United States Patent Application Publication US 2019/0144922 A1 - sequence listing, part 6

SEQ ID NO: 3 - DNA, 5315120 bp, Klebsiella pneumoniae (residues 1-1,771,707 of 5,315,120)
atggatgtgtatgctgttctatgagctggttttccgccgatctggatgttttttctcacggcagcgggaaaatacgtaagcctgctgaaatggggcaaattgagaaattcattgacttaagacggcagatactttaaccaatataggcaggacatacagacagataaaaatacagagtacacaacatccatgaatcgcatcggcatgattaccaccattatcaccaccaccattaccacaggtaacggtgcgggctgacgcgtacaggaaacacagaaaaaagcccgcacctgaacagtgcgggctttttttttgacaagagatcaaggggtaagaaccatgcgagtgttgaagttcggcggtacatcagtggcaaatgcggaacggtttctgcgggttgccgatattctggagagtaatgccaggcaggggcaggtagcgacggtcctgtctgccccggcgaagatcactaaccacctggtagcgatgattgaaaagaccattggcggccaggatgccctccccaatattgccgacgccgaacgcatttttgccgaacttcttcagggccttgccgacgcccagcccgctttcccgcttgcccagttaaaagccttcgtggagcaggaatttgctcagattaagcatgttctgcacggcatcagcctgctgggtcagtgcccggacagcgtcaatgccgcgctgatctgccgcggcgaaaagctctccatcgccatcatggcgggtctgctggaagcccgtggacataaagtcagtgtcattaacccggtcgaaaaactgctcgccgtgggccactatctggaatccaccgtcgatatcgccgaatccacccgccgcattgccgccagccagatcccggcagaccatatgatcctgatggccgggtttaccgccggcaatgagaaaggcgagctggtggtgctggggcgtaacggctccgactactcggctgcggtactggccgcctgcctgcgcgctgactgctgcgaaatctggaccgatgtcgacggagtgtacacctgcgatccgcgtcaggtgccggatgcgcgcctgctgaaatcgatgtcttatcaggaggcgatggagctctcctactttggcgcgaaagtgctgcacccgcgcaccatcgcccctatcgcccagttccaaatcccatgcctgattaaaaataccggcaacccacaggcgccgggaacgcttatcggcgccagccgcgacgaggacgatttgccggtgaaaggcatctctaacctcaacaacatggcgatgttcaacgtctccgggccggggatgaaagggatggtcggcatggcggcccgcgtcttcgccaccatgtcccgcgccggcatctcggtggtgttgatcactcaatcttcttcggagtacagcatcagtttctgcgtgccgcagagcgactgcgcacgtgccaaacgggcgatggaagatgagttttatctggagctgaaagaggggctgctggagccgctggcgattatggagcgtctggcgatcatctccgtggtgggcgacggaatgcgtaccctgcgcggtatctcggcgaaattctttgcggcactggcccgtgccaatatcaatatcgtggcgattgcccagggctcttccgagcgctcaatttcggtagtggtcagcaatgacgacgccaccaccggcgtgcgcgtgacccatcagatgctgttcaacaccgatcaggtgattgaagtgtttgtcatcggcgtcggcggcgtcggcggcgcgctgctagagcagatcaagcgccagcaggggtggctgaagaacaaacatatcgatctgcgcgtctgcggtgtagccaattctcaggcgctgctgaccagcgtgcatggcctgaatctggaaaactggagtgcggaactggcggaggcgaaagagccgtttaatcttggccgcctgatccgcctggtgaaagagtaccacctgctcaatccggtgatcgtcgactgtacctccagccaggcggtcgccgatcagtatgccgacttcctgcgcgaaggtttccatgtggtgacgccgaacaaaaaggccaataccttttcgctggattactatcaccagctgcgccatgcggccagcagctcgcggcgtaagttcctctatgacactaacgttggcgcgggcctgccggtgattgagaacctgcagaacctgctcaacgccggcgatgagctgcgccatttctccgggatcctgtccggctccctgtcgtttatcttcggcaagctggacgagggggtgagtttctccgcggcgacggcgatggcccgtgagatggggtataccgagccggatccgcgcgacgatttatccggggtggatgtggcgcgtaaactgctgattctggcccgcgagaccgggcgtgaactggagctggcggacattatcgtcgagtcggcgctgccgccggacttcgacgccagcggcgatgtcgagacctttatggcccgcctgccgtcgctggacgatggttttgcctcgcgggttgctaaggcgcgcgatgaaggtaaagtcttgcgctacgtcggtaacatcgaagaggatggtacctgccgggtaaaaatagccgcggttgacggcaacgatccgctgttcaaagttaagaatggtgagaacgcgctggctttttatagccattattatcagccattgccgctggtgctgcgcggctatggcgccgggaacgacgtcacggcggccggcgtattcgccgacctgctgcgcaccctgtcctggaagttaggagtttaagatggtcaaagtatatgccccggcttccagtgccaatatgagcgtcgggtttgatgtgttgggcgcggcggtcacgccggtcgatggcacgctgcttggcgacaacgtcactgtcgaagcggcggagcaatttagcctgcagaatcttggacgcttcgccagcaaactgccgacggcgccgcaggagaacattgtttaccagtgctgggaaagcttttgccgggagatcggcaagacggtgccggtggcgatgacgctggaaaaaaacatgccgattggctccgggctgggttccagcgcctgctcggtggtcgctgcgctggtggccatgaacgagttctgcggcaagccgctgaacgagacgcgcatgctggcgctgatgggagagatggaagggcgtatctccggcagcattcactacgacaacgtggcgccgtgctatcttggcggcatgcagttgatgatcgaagagaatgggattatcagtcagcaggtgcccgggtttgatgagtggctgtgggtgctggcctatccggggattaaagtctctactgctgaagcgcgggcgattctgccggcgcagtatcgccgccaggattgtatcgcccatggtcgccacctcgcgggctttattcacgcctgctacacccgccagccgcagctggcggcaaaattgatgaaagatgtgattgccgaaccgtaccgaaccaaactgctgccgggctttagcgaagcgcgtcaggcggccatggagatgggcgcccaggcttgcggcatctccggctctggcccaacgctgttcgcgttgtgtgataaaccggataccgcacagcgcgtcgccgactggcttggcgcgcactatctgcagaatcaggaaggctttgttcatatttgccggctggacacggcgggcgcacgcgtagtgggataaccaatgaaactgtataacttaaaagatcataacgagcaggtcagctttgcgcaggccgtcacccagggacttggcaagcatcagggcctgttctttccgcacgatctgccggaattcagcctgactgaaatcgacgacatgctggcgcaggactttgtcacccgtagcgccaaaattttatgcgcctttatcggcgatgagatcccgcaggatgtcctgcagcagcgggtgcgcgcggcgtttgcgtttccggcgccggtaagtaaggttcaggaagatgtcggctgtctggagctgttccatggccctacgctggcgttcaaggatttcggcggccgctttatggcgcagatgctgacccacatcgcaggcgataagccggtcaccatcctcaccgcgacctctggcgacaccggggcggcggtggcgcatgctttctacggcctgccgaacgtcaaggtagtgatcctctatccgcgcggcaagatcagtccgctgcaggagaagctgttctgtaccctcggcggcaatattgaaaccgtggcgattgatggcgactttgatgcctgccaggcgctggtgaagcaggcgtttgacgatgaagagctgaaggcgacgctgggtctcaactcggctaactccatcaacatcagccgcctgctggcgcagatctgttactacttcgaagcggcggcgcagctgccgcaggaagcccgcaatcagctggtgatttccgtgccgagcggcaacttcggcgatctgaccgccggtctgctggccaagtcgctggggctgccgatcaagcgctttatcgccgccaccaacgccaacgacaccgttccgcgctatctgcagggcggcgagtgggcgccaaaagccacccaggcgacgctgtccaacgccatggacgtcagccagccgaacaactggccgcgcgttgaagagctgttccgccgtaaaatctggcgtctcagcgagctgggctatgccgcggtcgatgatgagaccaccaaagcagcgatgcgcgagctgaaggccatcggctacatctctgaaccgcatgcggcgattgcctggcgcgcgctgcgcgatcagctgcagccgggagagtacggcctgttcctcggcaccgcccatccggcgaagttcaaagagagcgtggaggagatcctgcaggagactctgccgctgccgaaggagctggccgaccgcgccgacctgccgctgctgtctcacaacctgccggcggatttcgccgcgctgcgtaagctgatgatgggctaagccaggcaataatatcggcaacatgatcgaccaaaccgggcagctattgcccggtttttatatttaacgcacttttccatatcagtaaaatttctctccataaaattccccacactattttattgtcagcgcactgcttttattgcaaactcttttacggattgtcctctttgccggataattccactggattatcttttttatttattatttcatgctgcttatatttatgctgctgattttattatgaagcagctatagatatcatttgttatagatgtattgttaatgcacaaggttttcaaggaggaaacatgcgtattttatctcttttttttggtggtgttcgctttaacaggctgctccgggacaacgattggcggtaatgaagataaattaacgccagcctatctgaaacaacatctcattgtcggaaaaaccaccaaggccgaggttcgtcagtattttggtgccccggattctggtcatacgacggtgacggcgtcgggtaaagagagctggtattattcagtagataaagggatcaacctggtcagcctcgcgggttccatgatcccggtaaccggggcatcgcaagctgccgatgcggtcgataagtccagccaaaaagattcgaactcgctgatgattttcttcgatgaaaaaggcgtggtggaaaactgggtgcgttaaaataagtaataatctgcttaattatattgaaaaggggaataactccccttttttattaccgtaacgtgttactgctcgtggcgtttaaacaccagttcgcctttctctgaggcatccgcatcaaagaaatagccttcgctattaaaggctttgagctgctccggctgggttaagcggttttcaataatgtagcgactcatcaggccgcgggctttcttcgcataaaaactgatcactttgaatttgccgttcttctcatcgaggaataccggcttgatcagctgaccctgcaattttggcgttttcaccgatttaaaatattcatcggaagccaggttgatgacgatatcgtcgccctggtcgcgcagcgcctgattcagcttctcggtaatggtatccccccagaactggtacagatctttgccgcgcggattttccagacggatccccatctccaggcggtagggctgcatcaggtctaacgggcgcagcacgccatacagcccggagagcatgcgcagatgctgctgggcgaagtcaaagtcgtcctcggtgagtgtctctgcctgcaggccagtgtagacatcgcctttaaaggcgaggatcgcctggcgggcattttgcggcgtaaagtcagggtgccagtcgtggaagcgggtggcgtttagatccgccagcttgtcactaatgctcatcagcttgccgatttgcggtgcgctcagcttacgggcgatgccgataagctgctgagaatactcgaggagttcgggctgggtatagcgagtcgttgccagcgggctttgataatcgagcgttttagcaggtgaaatcagaatcagcatatccagtccttgcaggtaatttcgacgaattttaacaaaaaaagtgcatggtgggatcgatagctgcaattgccgcgctattcgcgcggcaattcattccaggcgcccggggccagctgttggtcaatatccgggtaacgagtggcatcgaaagtcggctggatacccagccgccgctgacgcagataatcgctggcgataatccgcaccgtcggggagagcaacagaatggccgtcaggttggtcatcgccatcagcgccatgatgatatccgcgctctgccagacgacaggcaggctaaccatggtccccaacagcaccatcaggacggtgagtattcgcagcccccagatatagcgtggcttatccaggcgcaggaaaaccagattattttccgcgtacacgtagttggctacgatagagctaaaggcgaacagcagcacgatgagggcgataaaacccgctccccagccgccgaccagcacgctcatcgcgtgttgcaagtcctgaataccgttgagcgtatattcattgtcgggccgcggcgccagcatgacgataatcgcgctggcggtacagatcacgatagtatcgataaacacgccaatcatctgcacgatcccctgcgccgccgggtgcggcggccaggaggcggcggccgcggcggcgttaggcgaagagcccatccctgcttcattggagaacatgccgcgctggaagccgctggtcagcgcctggctgatggtgtagcccaccgcgccggcggcggcctcctgccagccgaaggcgcagcgaaagatggtagcgaaaatcgtcggcagggcggtgatgtgccacaggccgatgagcaggctggtggcgatccacaacagcgccataaagggaacgatccattgcatcagacgcgccacgccgcgtaaaccacggaggatcgccagcaaaacgacaacggccagcacgccgccgctgaccgccgccggcagatcgaacgcatagcgcaaggcatgggccacggagttagcctgcacggtattgaagataaaaccataggccagcaggaggaggatcgaaaacaggacgcccatccaacgcatgccgagcccgcgcgccatataccaggccgggccgccgcgaaactgtccgcggctatcgcgttctttatacagctgagcaagggaacattcagcaaagctgctggccatgccgagcagggcggaaacccacatccagaatacggcgccgggcccaccggcggcgatcgccagcgtcaccccggcaagattgccgctgccgacccgggctgcaaggctggtacagagcgcctgaaaggacgttaaaccacccggctgcgggtgcaggcttttttttagactgcggccgaatttgcgcacgtaacgaaactgaataccccgggtttgccagctaaaccagataccggcgcccagtagcagataaatcattactgagccccagagtatttcattgataaatgagagaaaatcaggcattaaacatcctcttgtccatgccggcacgccagtgtaagcgttaccaattaagtgacaatcctttcgctttcagcaaattaatctgcatagtttatcacactctgcgctcttctctcgtcggcggttgcgctgacccggcagcgtgttatcatctgggcagaccggttacatccccttaactgctgtttaagagaaatatatcatgacggataaattaacttctctgcgtcagtacaccactgtcgtcgctgacaccggagatattgcggcaatgaagctgtatcagcctcaggatgccaccactaacccttccctgattctcggcgcggctcagatccctgagtaccgtaagctgattgacgacgctgtcgcctgggctcgtagccagagcagcgatcgcgcgcagcagatcctcgatgcttccgataagctggcggtgaacatcggtctcgaaattctgaaactgatcccgggccgtatctccaccgaagtggacgcacgtctctcctatgacaccgaagcgtctatcgctaaagccaagcgcatcatcaagctgtacaacgacgcgggcatcagcaacgatcgcattctgatcaaactggcctccacctggcagggcattcgcgccgctgaacagctggaaaaagaaggcattaactgtaacctgacgctgctgttctccttcgctcaggctcgcgcttgcgccgaagcgggcgtcttcctgatttcgccgttcgttggccgtatcctcgactggtacaaagccaacaccgacaagaaagagtacgcaccggcagaagatccgggcgtagtttccgtcagcgaaatctacgagtattacaagcagcacggctatgaaaccgtcgtgatgggcgcaagcttccgtaacgttggcgaaattctggaactggctggctgtgaccgcctgaccatcgccccggcgctgctgaaagagctgtccgaaagcgaaggcgccgttgagcgtaagctggtatataccggtgaagtgaaagcgcgtccggagcgtattaccgaatctgagttcctgtggcagcataaccaggatccgatggcggtagacaaactggcggaaggtatccgtaagtttgcgatcgaccaggaaaaactggaaaaaatgatcgacgaactgctgtaatcgcgcaggtggccgacgcccgtcggccacattacactgtctgtcccgcctccggcagtgtatcatttcgtttaacgccacagtttgaacggaataaccatgaataccttacgaatcggcttagtttccatttccgatcgcgcctccagcggcgtctatcaggacaaaggcatcccggcactggaagagtggctggcacgcgccctgaccacccctttcgagctgcaaacccgtctgattccggatgagcaggccatcattgagcaaacgctgtgcgaactggttgacgaaatggggtgccatctggtgctgaccaccggcggaaccggccctgcgcgtcgcgatgtgacgcccgacgcaacgctggcgatcgccgatcgcgagatgccgggcttcggcgagcaaatgcgccaggttagcctacactttgtgccgacggctatcctttcccggcaggtcggtgtgatccgcaagcaggcgctgatcctcaaccttcccgggcaaccgaaagcaattcaggagactctggaaggggtgaaagatgctgacggcaacgtgctggtgcacggtattttcgcaagtgtaccttattgtgtacagttgcttgaagggccttatgtggaaaccgatggccgtgtagtagaagcttttcgtcccaagagcgccaggcgcgaaactttatcctgaatttgatgcatttttgatataacctgcatcgctaatggtgtgccgttttatttacgatatagtgatttttactttacacactataaaacatgctgcacacctcaggatgaaattgcgttatgtcatatgcaaaccgaccgctcaaccgccaggattataaaacgctgacgctggccgccctgggcggcgcgctggagttttatgactttatcattttcgttttcttcgccgccgtcgtcggcgagctcttcttccctgcggatattcccgaatggctgcgccaggtgcaaacttttggcattttcgccgccggttacctggcgcgtccgctggggggcatcatcatggcccactttggcgatctggtggggcgcaagaaaatgttcaccctcagcatcctgctgatggcgctgccaaccctggcgatcggtctgctaccgacctatagctcggtaggtatcatcgccccgctgctattgctgctgatgcgtattctgcagggagcggcgatcggcggtgaagttccaggcgcctgggtgtttgtcgctgagcatgtcccggaaaaacgcattggtatcgcctgcggcacgctgacggccggcctgacggttggcattctgctggggtcggtggtggccacgcttatcaataccagtctgacgccgcaggggatccacgacggcggctggcggatccccttcctgctgggcggcgtatttggtctgatagcgatgtatctgcgccgctggctgcaggagacgccgatttttcttgagatgcagcagcgcaaagcgctggcgcaggagctgccggtaaaagcggtggcgctcaagcaccagaaggcggtggtgatctctatgctgctgacctggctgctgtcggctggcgtggtggtggtgatcctgatgtcgccggtctggctgcagaagcactatggttttgcgccggccattaccctgcaggccaacagcatcgccaccattatgttgtgcatcggctgtctgctcgccgggctggcggcggaccgcttcggcgccagccgcacttttatcgtcggcagcctgctgctggcggttgccagctgggcattttaccatcttgccggcgccagcccgcagcggctgttcctgctctacggtacggtggggctttgcgtcggcgtggtgggggcggtgccctatgtgatggtgcgggccttcccggcggaagtacgcttcaccggcatctctttctcctacaacctgtcgtacgcgatctttggcggcctgacgccgattgcggtcaccatgctgatgggggtgtcgccgatggcgccggcctggtatgtgctggccctgtcgctgatggggctaggattaggtatctggctgcgtcaggagctgacggcgccgacggggatgccggaaggggagctgcagcgttaacgatggctagctgatgctgataatgacctgccgccgccctgtgaccggacggcggcggaagattagcgcggttcgccgatcggcagcacggtgcggccgaactgttcgttcagcacttcacccatcgccaggtaaatagcgctggcgccacaaaccaggccgacccagccggctaccttcacaatgccttcgttatcggccaaatggccaatcgccagcagcgcgaacagtacggtcaggctcaggaagacaaactgcagcatgcgggctgccttcagggtgccaaagaacataaacagggtaaagacgccccacaggccgaggtacataccgaggaagtgcgcgtttggcgcgtctgccaggcccattttcggcatcagaagaatcgccaccagcgtcagccagaagctgccgtaggaggtaaaagcggttaagccaaaagtgttgccttttttgtattccagcaggccggcaaaaatttgcgcaatgccgccgtaaaaaatgcccatcgccaggatagctacatcgaatgcgaacaggccgctattcgccaggttaagcagaatagtggtcatgccgaagcccataaggcccagcggtgccggattagccaacttagtgttgcccataattcctcaaaattatcattaaaagggaagcattaccccgcgacttggcggcggggcgcggcataataatgaggcgctgaagggctgtctatgatctggcggggtatttttcaccaatttccgcggtgtctgacggcggctggagcatttgccgtaaacaggcaatatgcaggaccgcggggatggtgacccggtaggcgctgccgctcaccgctttcacgctgttcagcgcggcgccgagcggtccgcccagcccggcgccgcgcaccaggccatgaccgatgacgctcaccgcggcgtgcgtgcgcaggatggcggttaagcgttcgtccagcaacaaagtgacgccttcgcttagcttgcgatgcctcagcagatgagccatcaggctgtccagctcatggctccggcactccaccgcggcgagaaactgcgctttttgctccgcgttcagtttattccagctgtgctgcagaaaatgcgccagcaactgctgctcgatctgcggcgtcgacagctgtttgtcgaccttcgctttcagtcgtttacatacatccagcaggatcgcgcgataaaatttgccatggcggcgcagcgtgttggcgatgctatcgccgccaaaatgctgtagctcaccggcgattagctgccagttgcggcgataacgctccgggtgaccctccatcgctaaaaatgtctcgttgcgcaggagcgtgctggagagacggggtttgccattttccccgtgggtcagaatgcgggtaaaggcttccagatgcgcctcgctgcactcaggcagaaaggcgagatcgtcatcctccaggtaattaatatgcataacgttttctctcgggcaggggcgacgttagtcatcgccgataattttcagtgatgccatatctgaggagtgcaccgtgtggccggagaaggcgattttcttcacgcaacgtttgctgtcgttatcgctattgatgttgatccagccggtggtgctgccctctttgatcccggcggggacgttcagcgtgtggctggcgccgcggctggccttaaagtagaccgtcgccccggagagttgtacatcgccgcggtcggcgctgagctgaatgcgtttgaccacccggcagacggggagcgtcagcgtcaggtcgttggtttcattgcgcggcatagctatcacgccgagaattttatggtcgttagcggccgccgaggtgataaatgacacgccgaggataagccctacggaaagccggtatagcgatttcattaatttgtcccctgaataagcgaagtgcgatggcggggaagtttatcactgcgaaaacggggcttttagcgcgcaagtattgcgggttatgtcaatgatattatgaatgtatttcctattttaatccgttttttgtatgtatatttcgccgtcgtttttgccatccaataaccttgttcggcaagtcatccgtaaccctgggcgaatccgaggcaaaaaatttttatgcttgccccttgatgccggtgtgggcgaccccatcttgtagtcaaccgcagtgaagaacctgaaaaaaaatgatgtctgggcagttgaaaccgcacgtttcgcccttattacaggttcacaaccacatgttgatcgaatttttagtggagacgtttagatgggtaaaattattggtatcgacctgggtactaccaactcttgtgtagcgattatggatggcactactgcacgcgtgctggagaacgccgaaggcgatcgcaccacgccttctatcattgcctatacccaggatggtgaaactctggttggtcagccggctaaacgtcaggcagtgacaaacccgcaaaacaccctgtttgcgattaaacgcctgattggccgccgcttccaggacgaagaagttcagcgtgacgtttctatcatgccatacaaaattgttgccgcagacaatggcgacgcatggctggatgtgaaaggcaccaaaactgcaccgccgcagatctctgctgaagtgctgaagaaaatgaagaaaacggctgaagattacctgggtgaaccggtaactgaagcggttatcaccgtaccggcttacttcaacgatgcgcagcgtcaggcaacaaaagatgccggccgtatcgccggtctggaagtcaaacgtatcatcaacgaaccaaccgcggccgcgctggcttacggtctggataaagaagtgggcaaccgtactatcgcggtttacgacctcggtggtggtactttcgatatctcgattatcgaaatcgacgaagttgatggcgaaaaaacctttgaagttctggcgaccaacggtgatacccacctgggcggcgaagacttcgatactcgtctgatcaactacctcgttgatgagttcaagaaagatcagggcattgacctgcgcaacgacccgctggccatgcagcgcctgaaagaagccgctgagaaagcgaagattgaactgtcttctgctcagcagaccgacgttaacctgccgtacatcactgcagacgcgaccggtccgaaacacatgaacatcaaagtgactcgcgcgaaactggaaagcctggtagaagacctggttaaccgttccatcgagccgctgaaagtcgctctgcaggatgccggtctgtccgtttccgatatcaacgacgtgatcctcgttggtggtcagactcgtatgccgatggtgcagaagaaagtggccgagttctttggtaaagaaccgcgtaaagacgttaacccggatgaagccgtggcgatcggtgctgccgttcagggcggtgtactgactggcgatgtgaaagacgttctgctgctcgacgtaaccccgctgtcgctgggtatcgaaaccatgggcggcgtgatgactgcgcttatcagcaaaaacaccaccatcccgaccaagcacagccaggtgttctctaccgctgaagacaaccagtctgcggtaaccatccatgtgctgcagggtgagcgtaaacgcgcgtctgataacaaatctctgggtcagttcaacctggatggtattaacccggcgccgcgcggcatgccgcagatcgaagtgaccttcgacatcgatgctgacggtatcctgcacgtctccgcgaaagacaaaaacagcggtaaagagcagaagatcaccatcaaagcgtcttccggtctgaatgaagaagaaattcagaaaatggttcgcgaagcagaagctaacgccgaatctgaccgtaagttcgaagagctggtacagacccgcaaccagggcgaccatctgctgcacagcactcgtaagcaggttgaagaagcaggcgataaactgccggctgacgacaaaactgccattgagtctgcgctgaccgcgctggaatcttctctgaaaggcgaagacaaagcggatatcgaagcgaaaatgcaggcgctggcgcaggcttctcagaagctgatggaaattgctcagcagcagcacgctcagcagcaggcgggttccgctgacgctcaggcgagcaacgcgaaagacgacgatgttgtcgacgctgagttcgaagaagtgaaagataaaaaataatcgccctttgaacgggtaaaacactggcacgggcgaagaggtttcctctccgcccgtgcacgcatgttaaggggctgaaaaacaccgatggcaaagcaagattactacgagattttaggcgtttccaaaacagcggaagagcgtgaaatcaaaaaggcttataagcgcctggccatgaaatatcacccggaccgcaaccagggtgataaagaggctgaagccaaatttaaagaaatcaaagaagcgtatgaaatcctgactgatgcccagaagcgtgcggcctacgatcagtacggccacgcggccttcgaacagggcggcatgggcggcggcggcggttttggcggcggtgccgacttcagcgatatctttggcgatgttttcggcgatatctttggcggcgggcgtggtcgtcagcgcgcggcacgcggcgccgatctccgttacaacatggagctgacgctggaagaagcggtgcgcggcgtcactaaagagatccgtattccgacgctggaagagtgcgacgtctgccacggtagcggcgccaaggccggcagcaaaccgcagacctgtccgacctgtcatggcgcaggccaggtgcagatgcgccagggcttttttgcggtacagcagacctgtccgcactgccagggacgcggtacgctgattaaagatccgtgcaataaatgtcatggccatggccgcgtagaaaagaccaaaaccctgtcggttaaaattccggcgggcgtggataccggtgaccggatccgtctggcgggcgaaggcgaggccggcgaacatggcgcgccggcaggcgatctgtacgttcaggttcaggtgaagcagcacgctatctttgagcgtgaaggcaataacctgtactgcgaagttccgatcaacttcaccatggcggcgctgggcggtgagatcgaggtcccaacgctcgacggccgcgtgaacctgaaaattccaggtgaaacccagaccggcaagctgttccgcatgcgtggaaaaggcgtgaaatccgttcgcggcggcgcgcagggcgatctgctgtgccgcgtggtggtggagacgccggtggggctgaatgagaagcagaagcagctgctgaaagagctgcaggagagcttcggcggtccgaccggggaaaacaacagcccgcgttcgaaaagcttctttgacggcgtgaagaagttcttcgacgacctgacccgctaattccgcctttgttgatatccggcccgggcctttgctgcccgggctttttttcgccttagaactcccctttaactcgtaaaaagcgaatattagcgcaacttaaatctgattttttcgagttatcagtatgtgtattatgcttttatcgagttattcaccaacaggatgaaagtaaaagtgaaacatctgcaacgattctttagtagcgatgcttccggcggcattgtcttaattatcgccgccgcgctggcgatggtgatggccaataccagcgtgaccagtggtctgtatcactccttccttgagacgccagtacagctgcgtgtgggcgcgctggagatcaacaagaacatgctgttatggatcaatgatgctctgatggcggtgttctttttgctgattggcctggaggtcaagcgtgagctgattcaggggtcgctggcgagccgccgtcaggcggtcttcccggtgatagccgcgctgggcgggatgatcgtcccggccctggtctacctggcctttaacgcccaggatcctgtcgccagagaagggtgggcgatcccggcggcgacggatattgcctttgccctcggcgtgctggcgctgttaggtagccgggtcccgacggcgctgaagattttcctgatggcgctggcgattattgatgacctcggggctatcgtgattatcgcgctgttttatacccacgacctgtccatgctctcgctgggcgtggcggcggcggcgatcgcggtgctgatggccctgaatctgagcggcgtgcggcgtaccgggatctatattctggttggcgcggtgctgtggacggcggtgctgaagtctggcgttcacgcgacccttgccggggtgattgtcggctttatgatcccgctcgaagaaaagcatggcaagtcgccggccaaagcgcttgagcatgtcctgcacccgtgggtggcgtttatgatcctgccgctgtttgccttcgcgaacgcgggggtctcactgcagggggtcacccttgccgggctgacgtcgctcctgccgctgggcattatggctggcctgtttatcggtaagccgctggggattagcctgttctgctggctggccctgaagctgaagtgggcttcgctgccggagggaaccacctgcaagcaaattatggcggtggggatcctgtgcgggattggctttacgatgtcgattttcatcgccaccctggcctttggcagcgtggatcccgcgttgatcaactgggccaagcttggcatcctgatcggctcagtgctatcagcggtcgtcggctacctcatactgcgtcagcgcgtgacggatactcgcctcgcggtataacctttctgcaggagagcccgtcaggctctcctggacattatcagggagagaagcatgtcacatattaactacaatcatctgtactacttctggcacgtgtataaagaagggtccgtcgtgggcgcggcggaggcgctgtttctgacgccgcagaccattaccgggcagatcaaagccctggaggagcgcctgcaggggaaattatttaagcgaaagggaagggggcttgagccgagcgagctgggggagctggtttttcgctatgccgaccggatgtttaccctcagccaggagatgctcgacatcgtcaactatcgcaaagagtcgaacctgctgtttgacgtcggcgtggccgatgcgctctcgaaacggctggtcagcggcgtgctggatgccgccgtcgttgagagcgagcagattcatctgcgctgttttgaatccactcatgagctgctgctggagcagctgagccagcataagctcgacatgattatctctgactgcccgatcgactcgacgcagcaggaagggctattttcggtgaagatcggcgagtgcagcgtcagcttctggtgcatgaatccggcgccgacgaagccgttcccggcctgcctcgaagagcggcggctgctgatccccggccggcgatcgatgctgggacgtaagctgctgaactggattaacgtgcagggcctgaaggtggagatcctcggcgagtttgacgacgcggcgctcatgaaagccttcggcgccgcacataatgcgatatttgtcgcgccgacgctctacgcgcatgatttctaccatgatgaatcgattgtcgaaattggccgtatggatagcgtgatggaggagtatcacgctattttcgctgaacgaatgattcagcacccggcggtacagcgtatctgtaatcgcgattattcgtcgctgttcaccgaaccccgatagccggaaggcgtgggctggcgtggctcagatcgcgccagcgtgcgctaccgggggaagatggtaggcataaaaaaacccgctttcgcgggtttctttaacaaagttcagcaagcaggtgattaagccagtttgttgatctgtgcagtcaggtttgctttatgacgcgcagctttgtttttgtggatcagacctttagcagcctgacggtccacgatcggttgcatttcgttaaatgctttctgtgcagcagctttgtcgccagcttcgatagctgcgtatactttcttgatgaaagtacgcatcatagagcgacggcttgcgttgtgcttgcgagccttttcagactgaacggcgcgcttcttagctgatttgatattagccaaggtccaactcccaaatgtgttctatatggacaattcaaaggccgaggaatatgcccgtttagccttcttttgtcaatggatttgtgcaaataagcgccgtttaacaccacagcgcttcattacgtagtgatggcgcaagattctaccagcttgttgcaggcgaatacagcttttccaccataaaaatcgccgggcgcggccagttttcacgctttctcgcgctgagtgaatgaattcctgagaactttcgttgccgaggtgcaatcgctggttaacgttgacagttgtacaaggtatactcggacgattttcactgttttgagccagacatgaagctgatacgcggcatacataatctcagtcaggccccgcacgggtgcgtgctgaccattggtaatttcgacggcgtgcatcgtgggcatcaggcgctgctgcagcggttgcgcgaagagggccgccagcgcggtttaccggtcgtggtgatgatttttgaaccccagccgctggagctctttgccgctgataaagccccggcgcgattgacccgcctgcgtgaaaagctgggctatctggctgaaagcggggttgactatgtattgtgcgttcgctttgaccgccggttcgccgcgctaaccgcgcaggattttatcagtgaactgctggtgcgtcgcctgggcgtgcagttcctcgccgttggtgacgatttccgctttggcgctggtcgccagggggatttcttgttattacaaaaggcgggggcggaatatggcttcgacgtcaccagcacccaaaccttctgcgaaggcggggtgcgaatcagtagcacggcggtacgccaggcgctggccgatgacgatctcctgctggcggagacgctgctcggccatccgtttagcatctccggacgcgtcgtgcatggtgatgaactaggccgaaccataggttttccgacggcgaacttaccgctgcgtcgtcaggtttccccggtaaaaggggtctatgcggtagaagtgacagggctgggcgacaaaccgatagcgggcgtcgccaatattggcacccgtccaacggttgcgggcgtgcgtcagcagctcgaagtacatctgttggacgttgtaatggacctctacggtcgccatatcaatgtaatactgcgtaaaaagatacgtaacgagcagcggtttgcgtcgctggacgagctgaaggcgcaaatcgcacgtgatgagttaacggcccgcgaattatttgggctgaccagccaggcctgagccactggtgtttatcaaaccgaaatacggaaccgagaatctgatgagtgactataaatcgaccctgaatttgccggaaacagggttccctatgcgtggcgacctcgccaaacgcgaaccgggaatgctggcgcgttggaccgatgatgacctgtacggcatcattcgtgcagccaaaaaaggcaaaaaaaccttcattctgcatgatggccctccttatgcgaatggcagcattcatattggtcactcggtaaacaagattctgaaagacattatcgttaagtccaaaggactgacgggctatgactcgccttacgttccgggctgggactgccacggtctgccgatcgagctgaaagtggagcaggaatacggcaagccgggtgagaaatttaccgctgccgaattccgcgctaagtgccgcgaatatgccgccgagcagatcgatggccagcgtaaagactttatccgtctcggcgtgctgggcgactggtcgcatccgtacctgaccatggacttcaaaaccgaagccaacatcatccgcgcgctgggcaaaatcatcggtaatggccacctgcataaaggcgccaaaccggtgcactggtgcgtagactgccgttccgcgctggcggaagcggaagtggagtattacgacaaaacctctccgtctatcgatgtcgcgttccacgcggtagacaaagccgcggtactggcgaaattcggcgtagccgacgtcaacggtccggtgtcgctggttatctggaccaccacgccgtggaccctgccggccaaccgcgctatctctctgtctcctgagttcgactatgcgctggtgcaggttgacggccaggcgctgatcctggcgaaagacctggttgagagcgtaatgaagcgcgttggcgcgacggactacactattctggcggcggtacaaggttctgagcttgagctgatgcgctttaagcatccgttcctcgatttcgacgtgccggcgatccttggcgaccacgtgacgctggatgccggtaccggtgcggtgcataccgctggcggccacggtccggacgactacaccatcagccagaaatacggtctggaaatcgccaacccggttggcccggacggcgcttacctgcctggcacctggccgtccctggacggcattaatgttttcaaagccaatgacatcatcgttgagatgctgcgtgagcgtggcgcgctgttacacgttgagaaactgcagcacagctatccatgctgctggcgccacaagtcgccgatcatcttccgcgccactccgcagtggttcgtgagcatggatcagaaaggcctgcgcgcgcagtcgctgaaagagatcaaaggcgtgcagtggatcccggactggggccaggcgcgtatcgaatcgatggtcgctaaccgccctgactggtgtatctcccgtcagcgcacctggggcgtgccgatgtcgctgttcgtgcataaagaaacccatgaactgcacccgcgtacccttgagctgatggaagaagtggcaaaacgcgttgaagttgacggcatccaggcgtggtgggatctcgattcccgcgacattcttggcgatgacgccgacagctatgagaaagtgccggataccctcgacgtctggtttgactccgggtcgacccactcttccgtggttgacgtgcgtccggaattcgccggtcacgccgccgatatgtatctggaaggttctgaccagcatcgcggctggttcatgtcctcgctgatgatttccacggcgatgaaaggcaaagcgccatatcgtcaggtactgacccacggcttcaccgtcgacggtcagggccgcaaaatgtccaagtctatcggcaacaccgttagcccgcaggacgtgatgaacaagctcggcgccgatatcctgcgcctgtgggtggcttccaccgactacaccggcgaaatggcggtctctgacgagatcctcaaacgcgccgccgacagctatcgtcgtatccgtaataccgcgcgcttcctgctggcgaaccttaacggtttcgatccggtgaaagacatggttaaaccggaagagatggtggtgctggaccgctgggcggtcggctgcgcgcaggcggcacaggaagatatcctgaaagcctacgaatcctacgacttccatgaagtggtgcagcgcctgatgcgcttctgctccatcgagatgggctcgttctacctcgacatcatcaaagaccgccagtacaccgccaaggcggacagcgtggcgcgtcgcagctgccagaccgcgctgttccatatcgtggaagcgctggtgcgctggatggcgccgatcatgtccttcaccgcagatgaaatctggggctatctgccgggcgagcgtgagaaatatgtcttcaccggcgagtggtatgaaggtctgttcggcctggccgacgacgaagcgatgaacgacgatttctgggatgagctgctgaaggtgcgtggcgaagtcaacaaggtgatcgagcaggcgcgtgcggataagaaagtcggcggctcgctggaagcggcagtcacgctgtatgctgatgccgatctggcggctaagctcaatgcgctgggcgatgaattgcgatttgtcctgttgacctccggggcgaacgtcgcagactatgcgagcgcgtccgctgatgcgcagcaaagcgaactgcttaaagggctgaaagtcgcattgagtaaagctgaaggtgagaaatgcccgcgctgctggcattacaccaccgatatcggcaaggtggcggaacacgcggaaatctgcggacgctgtgtgagcaacgtcgccggtgacggcgagcaacgtaaattcgcctgatgagtaaatcgatctgttcaacggggctacgctggctgtgggtggtcgtagccgtgctgattatcgatctgggcagcaaattcctgatcctccagaacttcgctctgggggagacggttccgctgttcccgtcgcttaatctgcattatgcccgcaactatggcgcggcctttagcttcctcgccgacagcggcggctggcagcgctggttcttttccgggatcgcgatcggcatttgcgtagtgctgacggtgctgatgtaccgttcgaaggcgacgcaaaagctgaacaatattgcctacgcgctgattatcggcggcgcgctgggcaacttgttcgatcgcctgtggcatggctttgtggtcgatatgatcgacttctacgtcggcgactggcattttgccaccttcaacctcgccgatagcgcgatctgcatcggcgcagcgctgattgtgctggaaggcttcctgccgaaaccgactgtgaaagagcaggcgtaaatctcaatgccgggtgacgtgacgcttacccggcctacagaatttttggcccccgtaggcccggtaagcgtaatgccgccgggcaccgggtgacctaaacaagcgagcaatttgcatgtctaaatccgtacagagcaacagcgcggtactggtgcacttcactctgaaactggacgacggctccactgccgagtccacccgcagcaacggcaaaccggcgctgtttcgcctcggcgacacctctttgtctgaagggctggagcaacagcttctcggtttgaaagagggggagaaaaaggccttttcgctggagcctgacgccgcctttggcgtacccagcccggacctgattcagtatttctctcgccgcgagtttatcgacgctggcgagccggagatcggcgcgattatgctctttaccgcaatggatggcagcgaaatgcctggcgtgatccgcgaagtgaacggcgattccatcaccgttgacttcaaccatccgctggccgggcgcactgttcattttgatattgaagtgctggagatcgatccggcgctggaggagtaacatgcagatcctgttggctaacccgcgcggtttttgcgctggcgttgaccgcgctatcagcattgtagaaaacgcgctgacgctgtatggcgcaccgatctatgttcgtcatgaagtggtgcacaaccgctatgtggtggatagcctgcgcaagcgtggcgccatttttatcgaacagatcagcgaagtgccggacggcgcgatcctgattttctccgcccacggcgtgtcgcaggcggtacgcaacgaagcgaagagccgcgacctgacggtgttcgatgctacctgtccgctggtgaccaaagtccatatggaagtcgcccgcgccagccgccgcggcgaagagtcgattctgattggccatgccggccacccggaagtcgaaggtaccatgggacagtacaacaacccgcaaggggggatgtacctggtcgagtcgccggaagacgtgctgaagctggaagtgaaaaatgacgcccggctgtcgtttatgacccagaccacgctctccgtcgacgatacctcggatgtgattgacgccctgcgcgcgcgttttccgaaaatcgtcggcccgcgcaaagacgacatttgctatgctaccactaaccgtcaggaagccgtgcgcgcgctggcggagcaggctgacgtagtgctggtggtcgggtcgaaaaactcctccaactctaaccgcctcgccgagctggcgcagcggatgggtaaggcggcttacctgattgacgacgcctccgatatccaggaagcgtgggtcaaggatgcggcctgcgtcggcgtgacggcgggcgcgtcggcgccggatattctggtgcagaacgtcattacccgcctgcaggagctgggcggcggcgaagccgtgccgctggaaggccgggaagagaatatcgtctttgaagtgccgaaagagctgcgtgtggatgtccgtgaagtagagtaagttctttcctccagcagtatgagaagatgccagacttaacgtctggcatttttttagggagaaaccatgcgcttaccaatcattcttgataccgatccgggcatcgacgatgccgccgccattgccgcggcgctgttcgcgcctgagctggatctgcagttgatgaccaccgtagcgggcaatgtctcggtggagaagacgacccgtaacgcgctgcaattgctgcatttctggaatgccgatgtaccgctggcgcagggggcgtcgatgccgctggtgcgtccgttgcgcgacgccgcctcggtgcatggcgaatccggcatggaggggtatgactttgttgagcatcaacgtcaaccgctggcgaagccggccttccaggcgatccgtgatgcgcttatgcatgctgccgagccgatcaccctggtggcgattggcccgctgaccaatatagcgctgctgctgacccagtacccggaatgcgtgtttaatattcgccggctggtgatcatgggcggctcggcgggccgcggcaacttcacgccgaatgcggaattcaatatcgctatcgacccggaagccgccgcgaaagtgttccacagcgggctggagattgtgatgtgcgggctggacgtcaccaaccgggcgctgctggcggcggattatctggcgacgctgccgacgctgaaccagaccggtaaaatgctccatgcgctgtttagccactatcgcagcggcagcatgagcagtggtctgcgcatgcacgacttgtgcgctattgcgtggctggcccgcccggaactgttcactctccagccgtgctttgtggcggtggagacgcaggggacctggaccgccggcaccacggtggtggatatcgaagggcgactgggtcagccggcgaacgcccaggtggcgctggatatcgacgtcgaagggtttcagcgctgggcggcggaggtgattgccctggcgccgtgatatatcactcgattttcaaggagagaagcaatgacctatggacaggcgtatttgagcggctggaaagagacctttaattttagcggacgcgccagccggcagcagttctggacgttttttcttatcaatgtgctgatcgccgccgcgccagtggccgcctggagtctggccacccttgttgaccctcactacgggatcctcagttttgttgtcataccctttgcggcgctgtggctgctgttgatggcgctccccctgctggctgtaggctgccggcggatgcatgatatcggccgctccgggatctggtttgtgttgggagttatcattccgtggtttgcaattatttcgctggctctgtgctgcctgcgttcagcgccggcaccgtctcgctgagataatcgatcatcgcccgcatcctggcgggcatatgcttatctcccgcccacagtagccacaggtcgcctgagtagctgctgataaattcccactcgggcaacacctgcacgatgtcgccgttcgccagcgcctcacgggcggtgaacagaggcaggctgccgatccctaaatgctgtctgaccgcgtcgaggcgtacggcggtatggttggcggcgtaccgcccgtaggtttgcaccgtttctgttttgccttcccgacggaacttccagcgcgcatcggcgggcgtttcgccaaggctaatgcagctatgcgagcgcagatcctgcggcgtgtacggcgtaccgtgctgctgtaaataggcctcagtggcgcagataacgtgcctgattggcatcagcggtttgccatgcaggccgggggagggggtatcggtgatgcgtagcgccagatcaataccgtcatcgataaaatcgagagggcgatcttccagccgcaggcagacgtccacctgcgggtagcggtggaaaaacgccatcatcagcgggtggatcacaaagcggccgacggctttcgggacgctgagcgtcagctttccctgggcgaccgtttggcgactgcctgctgaatccattgcctgtcgcgccgcttccagcatctgctgggcatgctgatatatcgtttccccggcatcgctaagacgcagcttgcgggtggtacgctgcagcagtttgcagcccatctctcgctccagccgtgacacgctgcggctaacggctgaaggggtaatgccgttctggcgggcgacggcggagaagctgccctggtcgactatctgaacgaaaagagcgaggtcgggcaggaggttcagattcatttgtgctcccggagcaagagtgcattggctggtggtgggattatcgctgtcggcattaataatatactggccggacagagaggagaatcactatgactgaacgggtttattacaccagcgatgctaccgacgggcgcgcccagatcatcgcctgcactgcagaagcggatggccgttacgccatcgaactggatcggacgctgtttcacccgcaagggggcggtcaaccggcggaccgtggatggattgccgggcaggtggttgagacggtggctgtgcgcggcgaaagggtgctgcatattctgtcgcaaccccttcccctcggtgaagtggagatgaaaattgatgcctccgcgagacagctgcatgctcgtctgcattctgccggccacctgcttggcctggcgggcgaacagcttggctggcaaccggtgaaagcgcaccactggcccggcgaagggcggataacctttgccagcaggaatagcgccgcgctgccggacgccagtgcgctactggcgctagtgaaggcatggcaggcgcaggacttaccgcgtcaggtgacgttcgctaatggcatgcgcaaggtgggattcggcgaactgccagcctatccctgcggaggcacccacgtcgcccgtctggcggagctgggcgacattgtcattagtcagattaagatgaagaaggggcagctggtggtcagctacaccctggcgtaagcgttttatctctgctcaggataggtctgcttgccgtgatagatacgctcaggtcggccaaccttgccgtagctgatttccgcttccagaaagtcgttcttcactccttgttccagataacggcgagcggtggttttgctgctgccgaggatacgggccagcgagtcggcggtatgcaccaccgtcgggtcggcaaacagctggagcacgcgctgaaaggtgctttcatcgatcccgcgcagtggtgcgctggcgggttccgtttgttcccgggcctgaatattaaacagcgcgtcgacatggagctggctggcctgttcactggagcgcagcgagctacgatagcgggcaaagcgctccagcgtgtgctgcaggcgctgatagtgcaccggcttaatcaggtaatcaaacaccccaagacgcagcgcttcgctgatggtttccatgtgattatccgcagtaataaagataatccgtcccttgtaatgtgtactgactgcatggcggatcagatcgatacctttgccgtcgggtaaaaaattatccagcaggatcagctgcggttgatacagtctgagctgtttcctggcgctctcaagcttatccgcaataccaatgacgtcgaactggggaaactgtttaatgttatccaccaggatctccgccagcataggttcgtcttcaacaataagagtagtgatgctatccatgatgttcatctcgggtcagggggatataaagcgtaaaaatggtgccaaaaggaatattattttcgacgacgatactgccgcctgcttgttccacgtagctgcgtaccagccagagtccgataccatgatctttgctggcgctgctggtgacgccgcgctcgaagatccgatcgcgcagcgcctcgtcaatgccgcatccctggtcggcgatctcaatgatcacctcctggccatcactgttgatcaggcattcgatctgttttgaaccctgcggttgacgcaggctggcattgtaggcgttatcaagtagattccccacgatcgagatccattcgttgtgcgaaagggcggtaggtaatctatcaacgaagcaggccggatcgaaaatcagctcaagtccaagctctttggcccggtaatatttgccgatcaacagcccggccaggtggttgtcctggaaattgcgtgcaataaaatcgatcaccttctggtgactttccgactgctgttggatcagttccagcgcttggttatagcgtttaagaaacagcagaccggcgatagtggagatcagattgcgatgctcatgctgtacggcgcgcaggttatcggcatattgttgtacctggctaagctgcaggctaagggtgttgatatcgtctttgctgcgaaagctgatcacccagccctgtggctcattgtttaagatcaccgccatccggctggcgatcactttgatctgattgaaggtaacgatctcgtcttttttattggtctgtggcgcatcgtagaagaagacctcctgcgagataacgctgctgatccgtttgccgataagcgtcggttccggctgactcaaattgagcaggcgacgcgcagtctgattaatcgcagtgattttataatcggagtcgatggcgataagcccttcgaacaccgattcaaacagcacgctttgctggatcaacagctgtgacagctgctggggttccatattgagcatctgttttttgatatgcagtgagaagcggcgggcgcaaaagagcagaagcagtaacatgatggccatcgggatcagcagcgaacttatctgcaggctgagccagttttccagttgctcaatggtatagcctaccgacacaatgccgatcaccttgccggttgcgtcctgaatcggcgatttaccgcgcagcgacgatcccagcgagcctttgcgcactgacacgtagcttttagcgtttatcaacgcctcatcgctatcgccgccttccatcgatttgccgatttcatcaggattgacgtgatagaggcgctggccgctggcatcaccgacggtgatgtaggtggcgtcggagaacgaacgcatggggtcgataagggctttgattctggcgagatcgcgtttctgcactgcctccaccagctccggcatcgccgaaatctgcatcgcctgaatcagcgcccgttgcccgacctgataatgcagacgctcctcggtaatgtctgtcagataccatgacatcgccagcatgacgatcgtcgaggtgaataagatcagcaggaagatgcgattctgaaacgatcgcctggcaaaccagtgggtgatttttcgggtatacattgggtagatagacattaaattgttattctccccgttttgcgcccccggcgccgacaggtggagcacagaacagaaaatttcagacatgtgcccggccccgtcatgccaggagtgggtatcaaatcagcccggaggtggggcgacagccacacctccgggaaggatgtcggcctacatcgccagcacgtacttgagcatcaccccggcggcgatcgccgagccgatcacccccgccacgttcgggcccatcgcgtgcatcagcaggaagttctgcccgtccgcttccagacccaccttgttcgacacccgcgccgccatcggcaccgccgacacccccgccgagccgatcagcgggttgattttgtgccggctgaacacgttcatcagcttcgccatcagcaccccggcggcggtccccacgcagaaggcgatcacccccagcaccaggatccccagcgtctgcggctgcaggaacttgtccgccaccagcttggcccccaccgacagcccgaggaagatggtgacgatgttgatcagcgcgttctgcaccgtatcgctcagccgctccaccacgccgctctcgcgcatcaggttgccgaagcagaacatccccagcagcggcgcggcgtccggcagcaggagcgccaccagcagcaacagcaccgccgggaagaggatcttctcccgcttactcaccgtgcgcagctgcaccatgcggatcttccgctccttatccgtggtcagcgccttcatgatcggcggctggatcagcggcaccagcgccatataggagtacgccgccaccgcgatggcccccagcagctccggcgccagcttgcccgacaggtaaatcgccgtcgggccgtcggcgccgccgatgatgccgatggccgccgcctgcggcagggtgaagctgatgatgccgaagtagttcagcgtcagcgccccgagcacggtggcgaagatcccgaactgcgccgccgcccccagcagcagggtgcgcgggttagccagcagcgggccgaaatcggtcatcgccccgacgcccataaagatgaccagcggcgcgatgcccgagccaatcgccaccttatagaagatggccagcaccccggcggagtagcccatgtccaccgcgaggctctccatctgcccctgtaccgacggcagggccagcgccagtgcctctttgatggcgtggacgtccggcgcgcagtggagcttcgcggcaatcaccgccagctgcgccgggtcgtggtgagccagcaggctctccagggcggtgagcgccagcccggcctccgggatattggagagcaggccgccgaagccaatcggcagcagcagtaacggctcgaacttcttcgcaatcgccagccagagcagcagcaggctgaccagcagcatgatggcctggccggcgccgaggtgcatcagccccatgccctgaatcagggcgttcagactttccatttccgttccttttccttacgccagggtcatcagggtgtcgccgaccgccaccgcgtcgccggctttcaccgcgataccgcgcacggtcccggcctgcgcggcgcggatttcggtctccatcttcatggcttccagaatcagcagcacctcgcctgcggccaccgtctggccttcgctggccagcaccttccagatagtgcccgccagcggggcggtcaccggggtaccggcgccggccggggcggcagcggcgggtgcagaggcaggagcagccgccgtcagctggctgacgtcaccgccgtcgctgactttgaccacaaaggctttgccttccacctccacggtgtagacgccggaggcggcaggtttttctgcttttgccactggctgcgcggcttccgcctgcggtaccggctcaaaggccgccgggttgtggcggttttcgaggaatttcaggccgggctgcgggaacagcgccacggtgagcacgtcgtcgatggcgttttcggcaagcgtgatgcccttctcctgcgcctggcgtttcacatccgcttccagcgcggccagctccggcttgagtaaatccgccgggcggcaggtgacggcgtcggcgccgtcgagcacccgcgcctgcagggcggcgttaaccggcgccggggtgtggccgtattcgcctttcaggataccggcagtctccttcgcaatggttttgtagcgctcgccgcccagcacgttgagcaccgcctgggtgccgacaatctgcgaggtcggggtcaccagcgggatgaagccgaggtcctcgcgcacgcgggggatttccgccagcacctcatccagacggtgggcggcgctctgctgcttcagctggccttcgagattggtgagcatcccgcccggcacctgggcgacgaggatacggctgtcggtgcccttcagctggccttcgaaggcgtggtacttcttacgcacctcgcggaagtaggccgcgatgctctccagcctgtggatattgaggccggtgtcgtacggcgtgccggcgagggtggcgaccagcgcctcggtggccgggtggccgtaggtggcgctcatggacgaaatcgccgtatccacgccgtcgaccccggcttcaatggccttcagcagcgccatctccgccatcccggtggtggcatggcagtgcaggtgcagggtgacgtcatagcgcttcttgatttcgctgaccagctcaaaggcggcatgcggcgtcagaatgccggacatgtccttgatggcgacggagtcaacgccggtctccagcagctgttcggtgaggtcgagccaggtctgcagggtgtgggccgggctggtggtgtacgaaagcgtaccctgggcgtgggcgccgtggcggcggaccgcctgcagggcggcctgcatgttgcgcgggtcgttcatggcatcgaagacgcggaagacgtccatgccgtttttgacggcgcgctccacgaagcgctccaccacgtcatcggcgtagtggcggtagccgagcaggttctggccgcggagcagcatctgcagcggggtcttcggcatcgcctttttcagctcgcgcaggcggacccacgggtcctcgccgagaaagcggatgcaggcgtcaaaggtggcgccgccccagcactccagcgagcggtagccgacgtcgtccagctgagcggcgacggggagcatatcgtcaaggcgcagacgggtggcgaacagggactggtgggcgtcgcgcaggacgacatcggtaatggcaacggtcatgaattcctccgtgaattaagggtgaagacggcgatggtggtgaatggcggcgacaatcgccggcttcaggcgggcgaaatcgtcggcgggcgcgacggcggccggcgccggtttgggggcggcgggcggctcggaaaacaggcggttgacggcgagggacattccccggatggcgaaaatgagcagcagcaggaacaccagcacaaagcccatgccgagaaacatcagggtgaagccttcgcctaacaggatggcattgtcagtcatttatacatctcaaataggggcacgatgacgcgctgtctgacaaggtttctggcgtttccggctaaggagcagggtggatttccctctgccgctcccggcatgggaccctgattcgttcttcacctgtcagttcaacgtgccatcgtgcgtatgggttaaatcatcatgccgaacacgatgctggcgatgaccagcacaataccgccgcccaaacgggaggagatttgcgcataagagataaggttcatacggttacaggcagagagaacttccaggtcgccggagccgccgcggttggccatacacaggcctgcagtgatggccgattctattgggaagaagcccatcagccagccaccgatcgccgcgccgagcaccgcaccgataacgataatggcggcgataacaacgttagcgaaggtgatggcgttgataatttcctgtaggtcggtgtagcagacgccgaccccgaccatcagcacccacagcagctgtttggagaagaaatcagacaagcgtttagcaccggctttgatttccggtgagcacagcccggaggcgttcagcgcggcgacgatcagcaccatccacgcgaaatagtgaatagccacaccgccaatgctgggcagaattttcttcgccacgacgtaggccagcaggaagcaggtagtggacagcaccagaccgacggcggtttcgcgatgggtgatttgtcccgctttctcatcttcttccactttgaacgaggctttacgcaccagttccccttcgccgctcagccaggtgtgttttttgccgatgatatcgaggacggcggcaaagacgatggcgaagatgttagcgatggtcagaatagcgatagcggttgagtaatactcttcgcgagaacgaccggtgacggagtggtaaatctccgacagggggaccgcgcccgcgccgttgccgccacccatgatcggcaggacgtacagcatcatgatgcgatccactggaataccgaacaccaggccgatagcgatgccaaaaatagacgcgccgacaatgcccatcaggatagttggaatatagccgagcagtgatttcagcagcaggcggcggtttaccgacagaattgctccggtaattaataccgcgatgaataagttaaggaagttactcttatccataacgttgctgatagcatcgatttctttctgcgtaaaaataccggcatagacaaaataagccgccaccaggaaaatcatcaccggagcgccaccgatatatttgttgaatattggcaggcgcttgccaatttccccgaatatagcgccgataataaacatgatggcaaagccgccgacgatatcggtgggtaatgcgttataaaaatgtgaaagtaatagtgtaattaacgcaaatgcgtaaagggggagcggcatgccgaagattttaaatcccagcagatcgctaacgccctttttctccgtcgccggagcctgactcatgttagtcataaacgttatcctgtttattgatggagtagtaagaccggcgcatagtaataaatagacccaggggtaaggtgtgattatcttcactgaatactcgtgttttttattaatttaattgtttttatgattctgaattaattaacaacataaaaaccataaagccaattaagccacgagaaaaactgtgacttaaatacaagaatccatagccgaacgctggcgaaatacagttcgttttgaaatgacgaagcgctaaaaaatgacactgatattaaaacgcgttcagctattaaaagataaaccgcggcgagaggcgatcgatcggtttctccgccagcatcaactgtcgttagaggccgactgcgaaatggcgattatcgccgagtatcagcagcggctggtcggctgcggtgctatcgccggcaatgtgctgaaatgcatcgccatcgatccctcgctgcagggggaggggctgagccttaaattactgaccgagctcctgacgctggcctatgagctggggcgcagcgaactgtttttgttcactaaaccttgcaatgccgcgttattttccggcgccggcttctggccgatagcccaggcgggcgaccgcgccgtgctaatggaaaatagccgcgaacggctgactcgttactgtcgacagctggcgatgtaccgtcagccgggaagaaaaatcggcgctatcgtgatgaatgccaatcccttcaccctcggccaccgctggttggtagaacaggcggccagccagtgcgactggctgcatctgtttgtggtcaaagaagatgcgtcctgcttttcctatcacgatcgcttcaagctcattgaacaggggattaccggcatcgataaggtgacgctgcatcccggttcggcgtatctgatctcgcgggcgacgttccccggctatttcctgaaagagcagggggtggttgatgactgccacagccagattgacctgcagctcttccgcgagcgcctggccccggcgctgcagattacccatcgctttgtcggcaccgagccgctgtgtcccctgacccgtaattacaaccagcgcatgaagtcactactggaagcgccaggcgacgcgccgcccattgaagtagttgagcttgcgcgaatcgaaaaaaatggtggacccgtgtcggcctcccgagtgcgcgaactctatcgacagcgcaactggcaggcggtcgcggcgctggtaccgccgggaaccctctcttttctgatgcaactggcggaaagcgaacatcaaaccgcctgatttatacgccctaactaaggattttcccctatggaaatgaagattgacgccctggccggcacgctggagtccagcgatgtgatggtcaggattggacccgcggcgcagccgggcattcagctggaaatcgacagcattgtgaaacaacagtttggcgctgcgattgagcaggtagtgagagaaacgctggctcagcttggcgtgaaacaggccaacgtggtggtcgatgataaaggcgcgctggaatgtgttttgcgagctcgcgtacaggccgcggcgctgcgcgcggcgcaacagacccaattacaatggagccagctatgaaaccacgtcgcagtatgttgttcatccctggcgccaatgccgccatgttaagcacgtcattcgtctacggcgccgatgcggtgatgttcgacctggaagatgccgtttcgctgcgcgagaaagataccgctcgtctgctggtgtatcaggcgctgcagcatccactgtatcaggatatcgaaaccgtggtgcgcattaacccgctgaatacgccgttcggtcttgccgaccttgaagcggtagtccgcgcgggcgtggatatggtgcgtctgccgaaaaccgacagcaaagaagatatccatgagctggaagcgcatgttgagcggattgaacgcgagtgcggccgggaagtgggcagcaccaagttaatggcggcgatcgagtcggcgctgggcgtggtgaacgcggtggaaatcgcccgtgccagcccgcgtctggcggcgatcgcgctggcggccttcgattacgtgatggatatgggcacctcccgcggcgacggtactgaactgttctacgcccgctgcgctgtactgcatgccgcccgcgttgccggcatcgccgcctatgacgtggtgtggtcggatatcaataatgaagagggcttcctggcggaagcgaatctggccaaaaacctcggctttaacggcaaatcgttggttaacccacgacaaattgaactcctgcatcaggtctatgccccgacgcgcaaagaggtcgatcacgcgctggaagtgattgccgcggcggaagaagccgaaacgcgaggtctgggtgtggtatcgctgaacggcaagatgatcgatggaccgattatcgaccatgctcgcaaagtggtggcgctctcggcttccggtattcgtgattaaggggaataagatgaaagagacagtagcaatgcttaatcagcagtacgtgatgccgaatggactgacaccttatgccggcgtaacggcgaaaagtccctggctggcgagtgagagcgaaaagcgccagcgcaaaatctgcgattcgctggaaacggcaatccgtcgctccggcctgcaaaacggcatgaccatctcgtttcaccacgcgtttcgcggcggtgacaaagtcgtcaatatggtagtggcgaagctggcggaaatgggttttcgcgatctgacgctggcatccagttcgctgatcgacgcccactggccgctgatcgagcatattaaaaatggcgtgatccgccagatctacacctccggcctgcgcggcaagttgggcgaggagatctccgccggtttaatggaaaacccggtgcagatccactcccacggcggtcgcgtacagctgattcaaagcggcgagctgtcgattgatgtcgcgtttctcggcgttccttgctgcgatgagtttggcaacgccaacggctttagcggtaaatcacgctgcggttctctgggctacgcgcgcgtcgatgccgagcacgctaaatgcgtggtgctgctgaccgaagagtgggtggattatcctaactatccggccagtattgcccaggatcaggtggatctgatagtccaggtagatgaagtcggcaatccgcaaaaaattaccgcgggtgccatccgtctgaccagcaacccgcgcgagctgctgatcgcccgccaggcggcgaaagtcgttgagcactccggttactttaaagagggtttctcgctgcagaccggtaccggcggcgcctcgctggcagtaactcgcttccttgaagataaaatgcgccgtaacggcattaccgccagcttcggcctcggcggtatcaccgggacgatggtcgatttgcacgaaaaagggttgatcaaaacgctgctcgatacccagtccttcgatggcgacgcggcgcgttcgctggcgcagaacccgaaccatgtcgagatctccaccaatcagtatgccagcccgggctccaaaggcgcctcctgcgagcgcttaaacgtggtgatgctcagcgcgctggaaattgatatcgactttaacgttaacgtgatgaccggttctaacggtgtgctgcgcggggcgtccggtggccatagcgataccgccgccggtgcggatttgaccattattaccgcgccgttagttcgcggccgtattccctgcgtcgtggaaaaggtgctgacccgcgtcacgccgggggccagcgtggatgtgctggtcactgaccacggcattgcggtcaacccggcacgtcaggacctgatcgacaatttgcgcagcgcaggcattccactgatgaccattgaggaactgcagcagcgtgctgagctgttgactggcaagccgcagccgatcgaattcaccgatcgggtggtggcggtggtgcgctatcgcgacggttcggtcatcgatgtgattcgtcaggtgaaaaacagcgactaaacgcagaggggaaaggccatgagcgacgtgttaattaatccagcgcgtgtgcggcgcgtgaagccactgagtgccgaagaggtggtcagcgcggtagagcgcgcgctgttgaccgaagttcgcctgaccccaaagcccgggttggtggatattcgtaacgctggcgcgcactgggatatggatctggcctcgtttgaggccagcaccgcggtggtggctccgtggatggagaaatttttcatcatgggccacgatactgcggcggtcgcgccggaacaggtattgatgatgctgcgcccggtagggatggcctgtgagaacgatatgctggaggccaccggcggggtgaatacccatcgcggggcgatcttcgcttttggcctgctcagcgcggcggcgggcaggctggtgtcgaaaggtgagccgatagagcagcaccggctttgcgaccaggtggcgcgcttctgtcgcggcatggttatgcaggagttgtcttctgctggcggggaacggctcagtaaaggcgaggctcattttctgcgctatggtctctccggggcccgcggcgaggcggagagcggtttcctgacggtgcgtacccaggccatgccagtatttacccgcatgatggaagagaccggcgacagtaatctggcgctactgcaaaccctgctgcatctgatggcgtggaatgatgacaccaacctggtctcgcgcggcgggcttgccgggctgaactttgtccagcaggaggcgcagcgactgctgtggcagggcggcgtgctggcggacggcgggctggaggcgctgcgacagtttgacgatgagctgattgcccgccatctcagccccggcggcagcgccgatctgttggcggtgacctggtttttatccgcgtttcccgccggtgcgcttttcccgctgtaacccactgcaataccgccttcgcccgcactgtacgggcgaaagcgccatcattagccttcccggttgtcaccaggtaaacacggaattgcggcacaatcgtatagtttttactgatatcgtccgccgtttgtcataaatttctaattatcggcgtttttgagtagcggcccgctgacgggctggttactctgaaaacaatttacgtaatgttaacaaaagagaatagctatgcatgatgcacaaatccgcgtggccatcgccggcgcgggcggccggatgggacgccagttaattcaggctgcattgcagatggaaggcgtggcgctgggcgcggcgctggagcgcgaagggtcaagcctggtgggcagcgacgccggcgagctggcgggcgccggcaaagcgggcgtcgcggtgcagagcagcctggcggcggtaaaagatgatttcgacgtgttgatcgattttacccgcccggaaggcacgctgaaccatctggcgttttgccgcgagcacggcaaagggatggtcatcggcaccaccggttttgacgacgctggcaaacaggcgattcgcgatgccgcgcaggacattgccattgtcttcgccgctaactttagcgttggcgtcaatgtcctgttgaagctgctggagaaggcggcgaaggtgatgggcgactataccgacatcgaaattatcgaagcgcaccaccggcataaagtggatgcgccgtcaggcaccgcgctggcgatgggcgaagcgatcgctggggcattgaacaaagatcttaaggactgcgcggtctacagtcgtgaaggctacactggcgaacgcgtcccgggcaccatcggcttcgcgaccgttcgcgcgggcgatatcgtcggggagcatacggcaatgtttgctgacatcggtgagcgtattgaaatcacccataaagcgtccagccgcatgacctttgcaaatggcgccgttcgttcagcattatggctgaaaggcaagaaaaatggcctgtttgatatgcgtgatgtgctggatctgaatagtttataacgattattacccatcgtgatgtggttattgctatcaataagttattgatgcaaagggcaatattttgttgcccttttttatttttgcgtgttacggtggatgttttgagtgtaacgcgtaaaaaatacagtattagcgtgttttttagtgaatgaaatgtaaattttgaccatctggtccacttttttgtcgatcatctctctgttttacactcttccacatccgcaagcgttttctcagccaggtttgttgatctttttggcgtaaaaatcacgtgttacgcatcagtggcgtaaaatgacattaaaaatctccgctttaagttgacttttatccgacatctctccagaatgccgccgtttgccaaaaatctgcgggcaacagatttgcattgattcagatcgtgtttatgaattaatatgcaaataaagtgagtggatattctctggaggatgttttgattaagtcagcgctattggttctggaagacggaacccagtttcacggtcgggccatcggggcaaccggcacggcggttggggaagtcgttttcaatacttcaatgaccggttatcaagaaatcctcactgatccttcctattcccgccaaatcgtcactcttacttatcctcatattggtaatgtcggcaccaacgccgccgatgaagaatcttctcaggtacatgcgcaggggctggttattcgcgacctgccgctgattgccagcaacttccgcagtactgaagacctctcttcttatctgaagcgccataacatcgtggcgattgccgatatcgatacccgcaagctgacgcgtctgctgcgtgagaaaggggcgcagaacggctgcatcatcgcgggcgacagcccggatgcccagctggcgctggaaaaagcgaaagcgttcccgggcctgaacggcatggacttggcgaaggaagtgaccaccgcagaaacctatagctggacgcaaggcagctggaccctggcgggcgacctgccggaagcgaaagcggaaagcgagctgccgttccacgttgtggcatatgacttcggcgcgaaacgcaacatcctgcgcatgctggttgaccgcggctgccgcctgacggtggtgccggcgaagacctccgccgcggacgtgctggcgctcaatccggacggtatcttcctctccaacggccctggcgacccggcgccgtgcgattacgctatcgaggcgattgaaaaattccttgagaccgatattccggtattcggcatctgccttggccatcagctactggcgctggcgagcggtgccaagaccattaagatgaagttcggccaccacggcggcaaccacccggtgaaagatattgataacaacgtggtgatgatcactgcccagaaccacggtttcgccgtggatgaggcgacgctgccggccaacctgcgcgtgacccataagtcgctgttcgacggcaccctgcaggggatccatcgtaccgacaaaccggcgttcagcttccaggggcaccctgaagcgagcccggggccgcacgatgccgcgccgctgtttgaccactttatcgagttaattgagctctaccgtcagtccgcgaaataatcagaacctgtttatgttctgctgtgctcgggaatacggcgttaaaaatttgttcaaaatgctcatttacgttttgtaaactgcgctttctcacaaattttttccttgtctacccatcgctcgcgacgaccataaacaggttcttcggagaagaaagcaatgccaaaacgtacagacataaaaagtatcctgattctgggcgcgggcccgattgttatcggtcaggcgtgtgagtttgactactccggcgcccaggcgtgtaaagcgctgcgcgaagagggctaccgcgttatcctggtgaactctaacccggcgaccatcatgaccgacccggaaatggccgatgccacctacatcgagccgattcactgggaagtggtgcgtaaaatcatcgaaaaagagcgcccggatgcggtgctgccgaccatgggcggccagacggcgctgaactgcgcgctcgagctggagcgtcagggggtcctggctgaattcggcgtgaccatgattggcgccaccgccgatgcgattgataaagccgaagaccgtcgccgtttcgatatcgcaatgaaaaaaatcggcctcgacactgcgcgctctggtatcgcccacacgatggaagaggcgctggcggttgccgccgacgttggtttcccgtgcatcatccgtccgtccttcaccatgggcggcaccggcggcggtatcgcctataaccgcgaagagttcgaagaaatttgcgaacgcggcctggatctctctccgaccaacgaactgctgatcgatgaatcgctgatcggctggaaagagtacgagatggaagtggtgcgcgataagaacgataactgcatcatcgtctgctccatcgaaaacttcgacgccatggggatccacaccggtgactccatcaccgttgccccggcgcagaccctgaccgacaaagagtaccagatcatgcgtaacgcctcgatggcggtgctgcgtgaaatcggcgtcgaaaccggcggctctaacgtgcagttcgcggtcaacccgaaaaacggtcgcctgatcgttatcgaaatgaacccgcgcgtctcccgctcctcggcgctggcctctaaagccaccggcttcccgattgctaaagtggcagccaagctggcggtaggttatacccttgacgagctgatgaacgacatcaccggcggccgcaccccggcttcctttgaaccgtccatcgactacgtggtcactaaaatcccacgctttaacttcgaaaaattcgccggcgccaacgaccgtctgaccacccagatgaagtctgtcggcgaagtgatggcgattggccgtacccagcaggaatctttgcagaaagcgctgcgcggtctggaagtgggcgctaccggctttgacccgaaagtgagcctcgacgacccggaagcgctgaccaaaatccgccgcgagctgaaagatgccggcgctgagcgtatctggtatatcgctgacgcgttccgcgcgggcctctcggttgacggcgtcttcaacctgaccaacatcgaccgctggttcctggtacagattgaagagctggtccgtctggaagagaaagtggcggaagtgggcatcaacggcctcgacgctgacttcctgcgcaccctgaagcgtaaaggctttgccgatgcgcgtctggcgaagctggcgggcgtgcgggaagcggaaatccgcaagctgcgcgaccagtatgacctgcacccggtctacaagcgcgtggacacctgcgctgcggaatttgctaccgataccgcctacatgtactccacttatgaagaagagtgtgagtccaacccgtccgttgaccgcgataaaatcatggtcctcggcggcggcccgaaccgtatcggtcagggtatcgaattcgactactgctgcgtacacgcctcgctggcgctgcgcgaggacggttacgagaccatcatggtcaactgtaacccggaaaccgtctctaccgactacgacacctccgaccgtctgtattttgagccggtgaccctggaagacgtgctggaaatcgtgcgcatcgagaagccaaaaggcgttatcgtccagtacggcggccagaccccgctgaagctggctcgtgccctggaagctgccggcgtgccggttatcggtaccagtccggacgctatcgaccgggcggaagaccgtgagcgcttccagcacgcggttgaccgtctgaagctgaagcagccggcgaacgccaccgtcaccgccattgagcaggcggtagagaaagcgaaagagattggctacccgctggtggtgcgtccgtcttatgtgctcggcggccgggcgatggagatcgtctatgacgagcaggatctgcgccgctacttccagaccgcggtcagcgtctccaacgacgcgccggtgctgctggatcgcttcctcgacgatgcgattgaagtggatgtcgatgccatctgcgatggcgaaatggtgctgattggcggcatcatggagcatatcgagcaggcaggcgttcactccggcgactccgcctgttccctgccggcctacaccctgagcaaagagattcaggatgtaatgcgcgagcaggtgcagaagctggccttcgagctgcaggttcgcggtctgatgaacgttcagttcgcggtgaaagataacgaagtttatctgattgaggtcaacccgcgtgcggcgcgtaccgtaccgttcgtctccaaagccaccggcgtcccgctggcgaaagtggcggcgcgcgtgatggccggtaagacactggcgcagcagggcgtgaccaaagagatcatcccgccgtactactcggtgaaagaggtggtcctgccgttcaataaattcccgggcgttgacccgctgttagggccagaaatgcgctccaccggggaagtgatgggcgtcggccgcacctttgccgaagcgttcgccaaagcgcagctgggcagcaactcgaccatgaagaaacagggtcgcgcgctgctctccgtccgcgaaggcgataaagagcgcgtggttgacctggcggcgaagctgctgaagtttggcttcgagctggatgcgactcacggtacggcgattgtgctgggtgaagcgggcattaacccgcgtctggtgaacaaggtgcatgaaggtcgtccgcacattcaggaccgcatcaagaatggcgaatatacctacatcatcaacaccaccgcaggtcgccaggcgattgaagactccaagctgattcgccgcagcgcgctgcagtacaaagtgcattacgacaccaccctgaacggcggctttgccaccgcgatggcgctgaacgctgacgccaccgagaaggtgatttcggttcaggaaatgcacgcgcaaatcactaaataagcttcccggcctggccggatagcaacaatcctgggctgacgacatcgtcagcctattttttttggccgcagccatcttcagagagttctgcttttaaccccctgtcgggtcaggctaactatagttagcaccataacgatacctattgatgaaaagacaggaggatacaatgcggaacaatattctggtggcatccgcactggcagcgacggcaatcatgttcgtggccggctgctcatcgaatcagtcgatcaaaaccaccgacggcaagaccattgtcaccagcggcaaaccgcaggtggatgatgacaccggccttgtctcatacaaaaatgccgaaaccggccgcgtggagcagattaaccgcgaccaggtgaagtccatggacgagctggataactaaggcctgacgttaaccctcagggcgcgcgttgcgtaagccatcgcgacataaatcacagttatcattgtaagcggttcgcttaactgtctacactcttgctgattacgacaagagcaaacgcaggccaatcaatgattctgataatttatgcgcatccttatccgcagcattctcatgcgaataagcgaatgcttgaacaggcagggacgcttgaaggcgtagagatacgctccctctatcaactctatcccgactttaatatcgatgtcgccgccgagcaggcggcgctggcccgtgccgatctggttatctggcagcaccctatgcagtggtatagcgtaccgccgctgctcaagctgtggatggacaaggtgctgtcgcacggctgggcctatggtcacaacggtattgccctgcgcggtaaatcgctgatgtgggcggtgaccaccggcggcggtgaaagccacttcgacatcggctcattccccggttttccggtgctggcgcagccgttgcaggcaaccgcgctttactgcggaatgaaatggctgccgccgttcgctatgcactgcacctttatctgcgatgatgaaacgctgcaggcgcaggcccgccgctatcgtcaacgcttaatcgactggcaggaggcacaccagaatggatagccatacgctgatacaggcgttgatttacctcggcgccgcggcgctgattgtgcccatcgccgtccgtctggggctggggtcagtgctgggctatctcatcgccggctgtattatcggcccgtgggcgctgcggctggtgaccgatgccgaggcgattctgcactttgccgagattggcgtggtgctgatgttgttcgtcattggtctggagctcgatccgcagcgcttatggaagctgcgcgcctcggtgtttggcggcggcgcactgcagatggtggcctgcggggtgttgatcggcctgttctgcatgctgctgggcctgcgctggcaggtggccgagctgattggtatgactctggcgctttcctcaaccgcgatcgctatgcaggcgatgaatgagcgcaatctgacggtgtcgcagatggggcgcagcgcctttgcggtgctgctgttccaggatatcgccgcgatcccgctggtggcgatgatcccgctgctggcggccagcggcggcgccacttcgctgatggcttttgccctctccgcgctgaaagtggccgcagcgctggcgctggtggtggtccttgggcgctatctgacccgcccgctgctgcgctttgtcgcccgttccggcctgcgcgaagtgttcagcgccgtggccctgttcctggtcttcggctttggcttattgctggaagaggtggggctgtcgatggcgatgggggcgtttctcgccggggtgctgctggccagctccgaatatcgtcatgcgctggagagtgatattgagccgtttaaaggactgctgttggggctgttctttatcggcgtcggcatgtcgattgatttcggcaccctggtcacccatccgctgcgtattgtgattttgctggtcggtttcctggcgataaaaatgctgatgctgtggcttatcgccaggccgcttggcgtaccgcgcgcccagcgccgctggtttgcggtgctgctggggcaggggagtgagttcgcgtttgtggtgtttggcgccgcgcggatggcggatgtactggacggcgaatgggcaaaagcgttgaccctggcggtggccctgtcgatggcggcaacccccattctgctggtgctgctgacccgtctggagaaatcgtccagcggccaggcgcgtgatgctgacgagattgatgaagagcagccgcgggtgattgtcgccggctttggccgcttcgggcagattgccgggcgattgctgctctcgagcggggtgaagatggtgatcctcgatcatgacccggaccatgtcgataccctgcgcaaatttgatatgaaggttttctacggcgatgccacccgggtcgatctgctggagtcggccggggccgaaaaggcggaagtgctgatcaatgccattgacgatccgcacgtcagcctggagctggtggcgagggtaaaagagcattttccgcatctgcagatcatctcccgcgcccgcgatgtcgatcattacattcagctgcgccaggctggcgtcgaggccccggagcgtgaaaccttcgaggcggcgctgaagtccggccgaatgacgctggaggcgctggggctcggcgcctatgaagcgcgcgagcgggccgatctgtttcgtcgattcaacctgcagatggtcgaagagatggtggcgatggcggaaaacgatgccgcgtcgcgggtggcggtcttcaagcggaccagcgatatgctgaccggcatcatcaacgaagatcgtcatcatctgtcgctggttcagcgtcatggctggcagggtacggaagagggcaggcacaccggggatatcgccgatgagccggaaaataagccctcagcctgaggctgaccagtaacattttgttttcgtttggatcctcttctggcggcccacggtgtgaacgtgggcttgccagcaaatcagaaaattttcttattctttaccctccggccagtcgacgaagttgtacgctttccgtatagtggcgacaattttttgcactcgggaatgaatgaatgatcagtctgattgcggcgttagcggtagatcgcgtcattggtatggaaaacgccatgccatggaacctgcctgccgatctcgcctggttcaaacgcaacacgttaaataagccggtggtgatggggcgtctgacctgggaatccattgggcgcccattgccggggcgtaaaaatatcgtgatcagcagcaaacccggcagcgacgatcgcgtgcagtgggtctcctccgtagaagaagcaattgccgcctgcggcgatgtggaagagattatggtgatcggcggcggccgggtgtatgagcagttcctgccgaaagcgcagaagctctacttgacccatattgatgcggaagtggaaggcgatacccatttcccggattacgatccggacgaatgggagtcggtgttcagcgagtttcatgacgccgacgcgcagaactcccatagctactgctttgagatcctcgaacgccgttaagcgggcaggatagcgataaaaaaaccccggtcgcgtctggcgtgaccggggttttcttttgcatgaattgcgcgacgatggcgcactcagtatctcgtcgtgtttcccgtcgcgggcttcgtcttcctggagcgctgcccaaggctacaaatggcaaggaaatgtaggtcgggtaaggcgttagccgccacccgacaaaacgacgccgcaggtagcccggataaggcgcaacgcgccgctatccgggaagagtcaggacgcgacggcttcgccttcgtcgaggcttttctgccggtttgacggctgggtgaagtactgcttatcttcccagcgcaggcaggtgagttccccgccccagcagcagccggtatccagggcgtaaatcccctccggcgtgccgcgtccctccagcgaagcccagtggccaaaggcaatgctgtaggcattgctgaccgggccgggaatggcaaaccacggcttcagcggcgccggggcgtcctcgggcgcttccttcgaatacatatccagctggccgttcgggaaacagtagcgcatgcgggtaaaggcgttagagataaagcgcaggcgcgccaggccgctcagctcgttgctccagtggttcggcatgtcgccgtacatggcatcgaggaagaaaggataggagtcgctggagagcactgcttcaacatcgcgcgcgcactgctgggcggtctccagatcccactgcggcgtaatgccggcatgggccatcaccagctttttctcttcatccacctgcagcagcggctggcgacgcagccagttgagcagctcatcggcatccggcgcttccagcagtggtttcagacgatccttcggcttgttgcggctgataccggcaaagaccgccagcaggtgtaagtcatggttgcccagcaccagtcgtacgctgtcgcccagagatttgacatagcgcaggacctccagcgatcccgggcctcgggccaccagatcgccggtcagccacagcgtatctctccgcggatcgaattcaacctgcgctaataatgcgatcagttcatcgtagcaaccgtgaacgtcgccaataaggtatgttgacattgttttaatgaatgagcgttggaactgcgagacggaaaacagggatctcaatacggaacggcgcgccgtcgatatcgatcatctcataatgaccctgcatggttcccagcggcgtttcaatcactgcgccgctggtatattgatattcaccgccggcgggaatatacggttgctcgccgaccaccccttcaccctgaacttcagtctcacgaccgtggccgttagtgatgagccagtagcggccaagcagctgaacctgactccgccccaggttgcgaatggtgacggtgtaagcgaagacgtagcgctcttcttccggggaagactgcgattcgatatagacgctctgtacctggacacacacccggggcgaatgaatcatggttagctctccttcgttggcagattgtcagacagccagttggccatcaggcagtactgcgccacggaaatattttcggcgcgcatggccgggtcgatgcccagctcggtcagcacttccacgctgaacagattgccgagactgttgcggatagtcttgcggcgctggttgaacgcttcggtggtgatgcggctcagcacccggatctctttgaccggatacggcatggtgctgtgcggcaccaggcgtaccaccgcggagtcgaccttaggcggcggggtaaacgcgctcggcggcacttcgagtaccgggatcacctggcaataatattgcgccatcacgcttaaccgaccatacgccttactgttcggtccggcaaccagacgattcaccacttccttctgcagcataaagtgcatatcggcaatggcatcagtatagctgaacagatggaacatcagcggggtcgagatattgtacggcaggttgccgaagacgcgcagcggctggcccattttctccgccagttcgccaaagttcatggtcatcgcatcctgctgatagatggtcagctttggaccgaggaacggatgcgtctgtaggcgagccgccagatcgcggtccagttcgatgacggtcagctggtcaaggcgttcgccgaccggctcggtcagggccgccaggccggggccgatttcaaccatcgcctggcctttctgcgggttaatcgccgagacgatgctgtcgatcacaaactgatcgttgaggaagttctgcccgaagcgtttacgggctaaatggccctgatggactcgattattcattgggtattaacaatcattttgatggcgagattaagcgccgtgataaaactgccgacgtccgcttttccctggcccgctaattccagtgcggtgccgtggtcgacggaggtacgaataaaaggtaaaccgagcgtaatgttcacgccgcggccaaagccctggtattttagcacgggcaggccctgatcgtggtacatcgcgagtaccgcatcggcatgatcaagatatttcggctgaaagagggtgtctgccggcagcggaccgctgaggttcatcccctttgtgcgcatctcttccagcaccggaatgatggtgtctatctcttctgttcccatatggccgccttcgccagcgtgcgggttaagcccgcaaaccagcacatgcggctgggcaatgccaaatttcgtgcgcaggtcgtgatcgagaatggtgatgatctcgcgcagtagctcgggggtaatcgcttcgctgatggctttcaacggcagatgggtggtgaccagcgccacccgcagctcctcggtcgccaacatcatcaccactttgctggccttcgcgcgctcttcaaagaactcggtatgaccggtaaaggcgataccggcgtcgttgatgttgcctttatgcaccgggccggtcactaacgccgcaaactcgccgctaaggcaaccgtcgcaggcgcgcgccagcgtctccactacgtaggcgccgttttgcacattcagcacgccgggctccgccgggacgtttagcggcacgttcagcagcgtcagggtaccggcgcgctgaggaacaggaggttgcgcgggatcgtaagggaggagagataaaggaagaccgagccgcttggctcggtcagttaacagggcgccatcggcgcaaatcaccagctcaactggccagtcgcgctgggcaagctgcacgaccaggtcagggccaatcccggcgggttcgccgggagtgataacaactttacgggtttcaggcatcgatattagttgctcagaattttaacatacgcactggcgcgctgttcctgcatccaggttgccgcttcttcagagaatttgcggttcatcagcatgcggtaagcacgatctttctgcgcggcgtcggttctgtcgacctgacggctatccagcagttcgatcaggtgccagccaaaggaagagtgcaccggtccgctggtctgccctttgttcagacgcatcagcgcatcgcggaacgccgggtcaaagatgtccggcgtggcccagcctaaatcaccgccctggtttgccgaacccggatcttccgaataggttttcgccgcttgagcaaacgtgattttcccgctcttaatctcggctgcgatctgttctagcttagcctgagcctgggcgtcgttcatgatcggcgacggtttcagcagaatatgacgggcgtgaacctcggtaacggagatattctgggtaccaccgcgcaggtcgttgactttcagaatgtggaaaccaacgccggaacgaatcggaccgacgatatcccctttcttcgcggtgcttaacgcctgagcgaaaatgcccgggagctcctggatacggccccagcccatctggccacccttcagcgcctgttggtcagcggagtaggtgatcgccagtttgccgaagttggcgccgttgcgcgcctgctcaacgatggagtttgcttgctcctgggccgcggcgacttcatcagaggtcgggttctccggcagcgggatcaggatgtggctcaggttgagctcggtgctggcgtcgttctggtcgccgatctgtttcgccagcgcttccacttcctgcggcagcacggtgatgcgacgacgcacttcattgttacgcacttccgaaatcagcatctctttacggatctggttacggtaggtgttgtagttgatgccttcataggccagacggctgcgcatctgatccaaggtcatattattttgtttggcgatgttggcgatagcctgatcgagctggtcgtcagagatcttcacgcccatcttctgccccatctgtaacacgatctggtccatgatcagtctttcgaggatttgatggcgcagggtggcgtcatccggcagctgttggccagcctgaccagcattgagcttaaccgattgcatcaaaccatcgacgtcgctttccagcacgacgccattattgacgacggccgctactttatcgaccacctggggggcagcgaaactggtattcgcgatcatggcgataccgagaagcagcgttttccagttcttcatactttttccatttcgattaaccgcaaatgcggatgatgttgtaaaccagccgcatcacagggagctctggtacggtaaaatgttcgagcgcagcatctgctgggtgccgaggccgtagttagagctcagaccgcgcaattcgatattgattccgaaggtgttatcgtatttgctctcgccgccgttgtcgttgctgttccagccgttgactttacgttcgtagccaagacggatggcgtagcagcaggagttatactgcacacccaacatctggtttgctgctttccgggtattagtatcgtagtagtaggccccgaccacggaccagcgatcgacaatcggccaactggcggtcatccccacctgcgaaataccctgtttatattgtgccgcggtggaatatgacggcagcgtggcctgaatatattccgggctggcgtaacgatagttaagctggactaagcggttctcatcgcgacggtattcaatggtgccgttaccagtggcaacgttatccagacgcgtatcgtactggatccccccgcgcagaccccattcatcggcaatgcgccagtaggtatcgccggcccagaccagtgaacccgtggtatcgttgttctcccagttgatgttgtcatcaccggtgcgtgactcggtgaaatagtagatttgaccgacggaaatattaaaacgttccaccgcggcggcatcatacacgcgcgaggtgagcccggtggtgacctgattagccgacgcgatgcggtccagaccgctataggtacggtcgcggaacagaccggtgtaatccgactgcaacagcgtggagtcgtagttgcctatttcactctgatcgcggtacggcacgtacagatactgcacgcgcggttccagcgtttgggtgaatccctcctgcaggtcgcgttcaaagaccattttgccgtcgactttaaactgtggcattacgcggctgacggactctttatagtcagtgccgttggcggcattgtacttatcgaggttgctttgctggtagtgagtcgccagcagcttggcttcggtattcagactgccccaaccgttggacagcggcaggttgatcgtcggttcgaagtgaacgcgggtcgcttccggcatgttgttattcgagttaacaaaatgggcaacctgtccatagagatgggtatcgaacggaccgacatcattctggtagtagttgacgtcgagctgcggctcagccgaataggagttgctcgattcgcggtcaaagacctggaactgtttggtcgataccgtggcgtcaaagttctggttgacgtaaccggcgctgaatttctgcgtcgcatagccgtcggtactggaaccatatttcgagctgaagtcgttgaagtagtcaggatcgctgaccttggtgtagtcagcgttcagacgccatacctgatcgataacccctgagtggttccagtagaacagccagcggcggctgttgctgtcgctcgagtggtcgtcttcgtagactttatccgacggcaggtagtcgaattcagttaagccgctgccgagctgggtcagatagcggaactcgttttcccacatcacgccgccgcgtttgttcatatagtgcggagtaatggtggcatcgaagtttggcgcgatgttccagtagtacggcagggagaattccacgccgtttttggtgctgtatttcgcgttcgggatcaggaagcctgaacgacgcttatcgcccaccggcagctgcaggtaggggctatagaaaatcggcacagagccaagcttgaagcgggcgttccagatctcggcaacctgctcttcgcgatcgtggataacttcgctgccgacgacgctccaggtgtcggagcccggcagacaggaggtaaagctgccgttttcgagaatggtatagcggttttcaccgcgctgtttcatcaggtcggcggtgccgcgtccctggcgtccgaccatttgataatcgccctgccagacgttggtatctttggtattcagattcgaccaggcttttggccctttgaggatcacctggttatcgtcgtaatgcacgttgcccagcgcgtccaccgtgcgcaccggctgcgcctggcccgcggcctgctgctgatgcagctgaacttcgtcggcgcggaggcgactattcccctggttaatatcgacgttgccggtaaagacggcgttgtccgggtagttgcccttcgcatgatcggcgttaatcgtcaccggcagatcgccaggacgaccttccacgagcggacgatcatagcttggcacgccaagcatacattgcgttgcgagatcggcagcgaggccttgttggctatacaaggcgctggcaatcatcgtagccaggaggctgggaatacgttttttcatacgttgtatttattgttccatcatcttgtgacagcggcttgcaaacggtcagagcctaacttactcaacattatcacgctagtgttaatcctgcccgtttcgagcccgagcgttaggcaccctgttgaatgacgagtatgataaagcaaattataggctatgtcccacaattgaccgaggcgcgagtgccgggtaacgtgcggtcatattcgagcttaacggcgataaacagttggggagtctatgcagtatttgggtaaagtgattggcgtggcagtggctttgctgatgggtggtgggttctggggcgtggtgcttggctttctggtcggccatatgtttgaccgggcgcgcagccgccggttaaatctcttcgccaatcagcaggagcgtcagtcgctcttcttttccaccaccttcgaagtgatggggcacctgaccaaatccaagggccgcgttaccgaagcggatattcatgtcgccaatgtgctaatggatcgcatgaacctgcatggcgcctcgcgcaccgcggcgcagcaggcgtttcgcgacggtaaggccgacaactatcccctgcgcgagaaaatgcgtcagctgcgcagcgtctgctttggccgtttcgatctgattcggatgtttctggaaattcagctgcaggctgcgttcgctgatggcgaactgcatcctaacgaacgtgaagtgctgttcgtcattgccgacgagctcggcatctcccgcgcccagttcgatcaattcctgcggatgatgcagggcggcgcccagtttggcggcggttcgcagcagcgctcttatggccagcatggcggcaacgccggctggcagcaggcgcagcgtgggccgaccctcgaagatgcctgcaatgtgctgggagtaaaacctaccgacgacgcggcgacggtgaagcgcgcctatcgcaagctgatgaacgaacatcatccggacaagctggtagcgaaaggtctgccgccggagatgatggagatggccaaacagaaggcccaggagatccagaaggcctgggagctgatcaaagagcagcgcggcttctgacgtttccagcccctcccgtccggcgaggggttttaacttttgaccttagcgcggcgatacagccgccgcggatggccaatttttccgtacagcatctccacttccagaaaaccggtctcaacgccgtgctccagatagcgacgagcggtggttttgctaagcccggcggcgctgaccacttcatcaacggaaaaacagtgcgcttcccggtcgctaaacagtccctgcaccagcgccagcgttttctcttcaatccccttgctgccgctatccacgcgatagttcttcgcctgcagttgatagagggaatcgacgttttgctgatcgacgattttccactcccgttgctgatcgtagaactggataaagcgctccagcgactggctcagccgcttccatgataccggcttaaggatatagtcgaaggcgccgttgcggatggcctggctgcaggtttccatatcgctggcggcggtgataaagatcaccgagcattggctggtcgccagcgccgggtcggtcatcagcgtgacgcctttgccgtccggtaaatagttatccagcagcaccagctgcggcggcgtggcgtgaagcagctgccgcgcctgggcgagggaggccgccatgcctgccagccgcagtcgcgggtgtttttgcacaagctcggcgtgcaggcgcgccagttcgctctcatcttcaatgattagcacatcgaccaggtcatgatgcatcgtgggcctccggttgcggacaggcgtgcgcgtcggccgggataaatagggtgaagatcgttccccgcggcgcgttatcggcgacttcgatggtgccgcccgcctgagtgacataatgttcaataagatacagaccaatgccgtgatcgccacgggttttggtggtgacgccgcgttcaaaaatgcgctcgcggatatcggggcggataccgacgccgcggtcggccacttcgataatcaactcccgggcgttgagctggatcaggacttccaccggctcatgcggcagctcggcacgctgcgtggcttcgatggcgttatccagcaggttgccgatgatggagatcagctcggattccatcagcgacggcagggggcggtcgatgcggcaggccgggtcgaagctcagcgccacgcctttttcgcgggcgcgggtggctttgccgagcagcagaccgcatagcgtcggcgagtggaagtgcgaggagataaagtccagtagctcctgagcatgttccgactgggcctgaatatagcggatcgcttcgtcataatggcccatatgcagcaggccggagagggtagtcatccggttgagctgctcgtggcgcatgatgcgcagattgtcgacatagcgcttcacctggctcagctgggcggtgagggcattgatttcattgcggtcacggaatgtgatcacccagccctgcagggtattctccagcataatgcgcacccgactggcgagcacggtcaactggttgaagcggcatagctcatcgtgggtatcgcgttcgagcatgtcgccgctggcgaaaaagggctgcggcgaaatgacgctgtcgatcgactgaccgcgcagctggcgggcgggctggctgagccccagcaggctgcgggcggcatggtttatcacctcaatacgccgctggcgatcgatgacgatcaccccctcaaagatcgactccatcatcgccttttgctggcgaaccagcaggccaatttcccgcggctcgagcgaaaaaatctgcttcttgatactgcgggtaaagtaccaggagaagataaacagggcgatgagcagcaggacggcggcgataaaaatattgatcactttagtcagagtaatgctgtcgagatagctggtgaggtagccgacggagacaataccgatcactcgccctgcgtcatcaacgatgggcgttttgctgcgcagcgagaccccgaggccgcctttgcgaatggtggtgatggatttcccttccagtaccgcctggttgtcgccgccgaccagtcgggtgccaacccactccggatggacggaatgaaacagatgaactccctgacggtcgccgatgacgataaagctggcgtcgctatgggcggcgatttgctgcataaacgcctgaatcgcctgtgggtcgtgccggctgacctgttgacgtaaattcggcatcagggctatctcttcggcctgtattttggcccgggcgctcatctcctgataaagctggcggctggcgtcaaaataataataaatgcccagcgcgataaaaaggaccgagaaaaaagcgaccagagaaataaacagcttatattgaaaagataatttcataggccccggacgacgtattaaccatagcggcactctatcatttttctgtcacgtgacgtaaatgttaagggaaagttgtgatcagcggcgcaggtgcgggctgccgccagcggtcgcggcggaaataggcggccggcgggaaataaaaaccataaaaaccacagtcataaatcagagatatatcactcccgggcagttcagcgaataaaaaccataaaaaccatagtgaccattaaaacttcttttttaatttgggaagcttcacattaacgacgccgctgtccctttacgctgaaaatgaataataacgacagggctgaatttatgagcaccacagacaatgcattctctgcaacccttgaaccgatcgatacgccgaaaaccacgctcaagcagcgctggtggcatattatggataactggaaggtggggatcgtcccgctgccgctgtttctgctggccggaggactgattgccctcgactgccttggcggcaaactgccgagcgatatcgtggtgatggtggccaccctggctttctttggcttcgcctgcggcgagtttggtaaacgcctcccggtgctggggaaactcggtgcggcggcgatctgcgccacctttattccttccgcgctggtccactatggtctgctgcctgacgtggttattgaatccacgaccaaattctataaatccactaacatcctctatctctatatctgctgcatcattgtcggcagcatcatgagtatgaaccgcaccacgctgattcagggctttctgaagatcttcttcccgatgctgtgcggcgaagtggtcggcatgctggtgggcatcggcgtcggcacgctgctgggcatggagccgttccaggtgttcttctttatcgtgctgccgattatggccggcggcgtgggagagggggcgatcccgctgtcaatgggttatgccgcgctgatgcatatggagcagggcgtggccctgggccgggtattgccgatggtgatgcttggcagcctgacggcgatcgtcatctccggctgcctcaaccagctcggcaagcgcttcccgcatctgaccggcgaagggcaactgatgccgaaccgcagccatgaaacccgcagcctcagcgagagcgaaggcgtgagcggtaagaccgacgttgggaccctcgcctccggcgcgctgctggcggtactgctgtatatgatggggatgctcggccacaaactgattggtctgccggcgccggtaggcatgctgttcctcgcggtgctgttaaagctggctaacgtggtgtctccgcgtctgcaggaggggtcgcagatggtgtataaattcttccgcaccgcggtcacctacccgatcctctttgccgtcggcgtggcgatcaccccgtggcaggaactggtaaacgccttcactttaaccaacctgctggtgatcgtcagtaccgtctccgcgctggtggcgaccggtttcctggttggtaaaaagatagggatgcacccgatcgatgtggcgattgtttcctgttgccagagcgggcagggcggcaccggcgatgtggcgatcctgaccgccggcaaccgcatgagcctgatgccgttcgcgcagatcgctacccgcatcggcggggcgataaatgtctcgctggggttgctgttcctcagccactatctggcgtgatataacgctacgctcagcgataaatctgctattttccgctacagaacgccgaaaatatctgcgttctgtatcctaaatgctccgcatttagcgttacaatcagcgcgcgatcggctatcgcaaccatcatcatgacagtccaggcgctgtcgtatttatcatatgtaggagaggaattaatgtcagtggatactcccgcccaggcgggcgtcagcatcgacgcattgctggcggcgaaagagcagcgtgcagcccgccaggccgactggttggcccattatcagcagcctgttatttccctgaccctggtgaccccgggggcggtgaaggacagcattcgctatcgcaatatgatgggcgttgccctccaggcctgcgatcagctgctgtggaagcaccgctggcaaacgctggatcgtcaggtgctatggctgccgaccgggccagaagcgctgtggtgcgtagcgcatccggccagcgaaatcaaagcgatgtgcagtacgctggagcagagccatccgctgggacgcctgtgggatatcgatgtaatctgtccgcagaacgggctggtgggacgccagtcgctgggcgaatcgcagcgccgctgcctgctgtgcgatgagccggcgcacgcctgtgcgcgcagccgtcgtcacgacaccgatctcgtcgtcgcccgcgttgagcagatgattgacgcgtggttcgcccgcgattaatcgggattgttttctgtatcctcactaatccgagttgcacgcagccaacccgcatgcaactcgaagtatgagcgttaaaagtcgatcggtgcgcgaaaggtcatcgcgttgccgtaggcaggatgggtgatggtgagcgtctcggcgtgcagcagcaggcgcggggccatcgccagcgcctccggcgtggcatagaagcggtcgccaaggatcggatgccccagcgccagcatatgcacgcgcagctggtgcgaccgtccggtaatcggcttcaggcgcacgcgggcggtgttatcctctgcgtactccagtacctcatattcggtttgcgccgctttgccggtttcatagcacaccttctgcattggccggttcggccagtcgcaaatcagcggtaaatccacgaggccttccgccggctgcggatggccccagacgcgggcgacgtactgcttcttcggctcgcgctcgcggaactgacgcttcagttcacgctcggcggctttattcagcgccaccacaatcacgccgctggtggccatatccaggcgatgcaccgattcggcctgcgggaagtcgcgctgaatgcgcgtcatcacgctgtctttatgctcctcaagacgaccggggacggacaacaagccgctcggcttgttgaccaccatgatgtgctcatcctgatacaggatcaccagccagggatcctgcggcggattgtagttttccatcgccatgttcgcgttccgttactggtgagtgacgacgatcagacgcagcgcgtccagacgccatccggcctgcgccagcgcatccatcacctgctgacggttgctttcgatcgccgccagttcgtcgtcacggatgttcgggttcaccgccttcagcgcttccagacgggaaagctcagccgtcagcttttcatcggcttcgttacgcgccgcgtcgatcagcccctgcgccgctttggcgatctgcgcttcaccctgctgcagaatcgcgtgaacgtcctgctgcaccgcattgaccagcttgctaccggtatggcggttgaccgcgctcagctggcggttgaagctttcgaactccacctgcgcggcgaggttgttgccgtttttatccagcagcatgcgaaccggggtcgccggcaggaagcggttgagctgcagctgcttcggcgcctgcgcttcgacgacatagatcagctccagcagcagggtgccgaccggcagcgccttgttcttcagcagcgaaatggtgctgctgccggtatcgccggaaaggatcaggtccagaccgttgcgtatcagcgggtgttcccaggtaataaattgcgcatcttcacgcgacagcgccacgtcacgttcgaaggtgatggtgcaaccgtcttccggcaggcccgggaaatccggcaccagcatatggtcggaaggggtgaggacgatcaggttttcaccgcggtcgtcctggttgatgccgacgatatcgaacaggttcatcgagaaagcgatcaggctggtgtcgtcatcctgctcttcgatgctctccgccagggcctgggctttctcgccgccgttggagtggatctccagcagacggtcgcggccctgctccagctgcgccttcagggcatcatgctgttggcggcaggatttgatcagatcgtcaaagccgtcgatggattccggcgccgcaagatagttgatcagttcatcgtgcacgctgtcgtagacggtgcgaccggtcgggcaggtatgttcgaaggcgtcgagcccttcgtgataccagcgcaccagcaccgactgcgcggttttttccaggtacggaacgtggatctggatatcgtgcgcctggccgatacggtcgagacgaccgatacgctgctccagcagatccgggttaaacggcaggtcgaacatcaccaggttgctggcgaactggaagttgcgtccttcggagccgatctcggagcacagcagcacctgggcgccggtgtcttcttcagcaaaccacgccgcggcgcggtcgcgttcgataatcgacatgccttcatggaacaccgcggcgcggatgccttcgcgctcgcgcagcacctgctccagctgcagggcggtggcggccttagcgcagattaccagcaccttctgcgagcgatggctggtcaggtagcccatcagccactcgacgcgcgggtcgaagttccaccaggtaccggtatcaccttcaaattcctgatagatctgctccggatagagcatgtcgcgcgcgcgctcttccgcggttttgcgcgcgcccataatgccggacactttgatggccgtctggtactgggtcggcagcggcagacgaatggtgtgcagctcgcgtttcgggaaacctttgacgccgttacgggtattacggaacagcacgcggctggtgccgtggcggtccatcagcatcgagatcagctcctggcgcgcggcctgggcatcttcgcgatcgctgttggcggcctgcagcagcggctcgatatcctgctcgccgatcagatcgcccagggtattgagttcgctatcgctcagcttgttgcccgccagcagcagcgcgacggcgtcggccaccggacggtagttctgctgttcttcgacaaactgttcaaaatcgtggaagcggttcggatccaacagacgcaggcgcgcaaaatggctctccattcccagctgttccggcgtcgcggtcagcagcaggatacccggcacgcgctcagccagctgttcaatagcctgatattcacggctcggcgcctcttcgctccacaccaggtggtgcgcttcgtcgaccaccatcaggtcccattcggcgtcgcacaggtgctccaggcgctgcttgctgcgacgcacgaagtctaaagagcagatcaccagctgttcggtttcgaacggattgtaggcatcgtgctgcgcttcggcgtagcgctcgtcatcgaacagcgagaaacgcaggttgaaacggcgcagcatctccaccagccactggtgctggagggtttccgggaccacgatcagcacgcgctctgcggcgccggagagcagctgctggtgcaggatcatcccggcttcaatggttttacctaagcccacttcatcggccagcaggacgcgcggcgcgtgacgacggcccacatcgtgggcaatatgcagctggtgcgggatcaggctggtgcgctggccgcgcaggccgctccacggcatgcggtactgttcgctctggaacttgcgcgcgcggtagcgcagggcaaagcgatccatacggtcgatttggccggcgaacaggcggtcctgcggtttgctgaataccagtttgctgtcgagcagcacttcacgcagggtgacgttcgcttcctgggtgtccaggcgggtgccagtgtaggacagcagcccgttctcttcattcactttgtcaacgtggagctgccagccttcatggctggtgatggtgtcgcccgggttaaacattacgcgggtgatcggggaatcgttgcgagagtacagacggttttcgccgatggcggggaaaaggagagtgaccatgcgcgcatccagcgctaccaccgtccctaatcctaattcgctctctgtgtcgctaatccagcgttgaccaagtgtaaaaggcatatatgttcggctctttagttctttaattgcaggcaatagttgatcatctccatgaacaatcggagatgcgtcaaaattggggccaggaatggaaagggcgctatattactggatggcagaacgttcgtcacgttctcctcacgcttcatttttaggctttcgtgcccgtggaatgggtgacaaaaaatcaaaatagccccaactgtcctgtcactattgtagcaaagtcatcgttgacgaagggcaggatcccttccgccaccggctgcaactgctttgttaaatagtgatcgtaatcgagcggcgactgctggtaatccaccggctccgggccgctggtggtccagacgtatttgatggtgccgcgctgctgatactgctgcgcccgcccaagcttcaggttgtgttcatcggcaagccgggcggcgcgcacgtgcggcggtacgttgcgctgatactccgccagcggccggcgcaggcgtttgcgataaaccagctgttcgtcgagctcgccgttcatcagcctggcgatagtctcccgcacataatcctgatacggctggttgcggaagatgcgcaggtataactcttgttgaaactgctgggccagcggcgtccagtcggtacgcaccgtttccagccccttaaacaccatgcgctgggcatcgccctcctgaatcatcccggcatagcgcttcttgctgccggtatcggcgccgcggatcgtcggcattaaaaagcggcagaagtgggtttcatactccagctccagggcgctggtaagctggcttttgctaagctcctgcgcccaccaggcgttgacatcgctgaccagctcgcggccgatcttcgccgcctgggcttcgctgtgcgggcgcttaagccagacgaaggtggagtcggtatcgccgtagataacgtcatagcctttggcttcaattaacgctttagtctggcgcatgatcgcatggccgcgcatggtgatcgacgaggcgagacgcgggtcgaagaagcggcaggcgctggtccccagcacgccgtaaaaggcgttcataatgatcttcagcgcctgggagagcggcttattgtgctggcgtttggcttcatcccggccgtgccagatctggctgacaatccccggcaggcagtgcttatctcgcgagaagcgggcgccgaggaagccctcgatactgtgctgatcatcgggttgcgccagcccttcaaccaggccgaccggatcgattagaaaggtacgaataatcgacggatacaggcttttatagtccagcaccagcaccgagtcatacaggccggggcgggagtccatcacgtagccgccggggctcgcctgcggcggtacgtcgccgagattcggcgccacgtagcccaggcggtgcatgcgcgggaaatagagatggctgaaggcggcgaccgagccgccgtggcggtcggcgggcagaccgttgaccgtcgctcgttcgagcaaaaacggcatgatctccgttttgtggaagatccgcgtcaccagctcgcaatcctgcaggttatagatggccagcgccggtttgtcttcatgaaaccggcgatcgatctcatccatccgatcccatgggttgtcgatggctttgccttctcccagcagctcgcgggccaccgcctccagcgaaaaggaggagaaattccagaacgccgattttagcgcgtcgatgccgtcgataatcagccgcccgttggcctgggcgaaaaagacgccgttcttaaagccgtgctcacgccactccagctcgctgttgccgcggccgagtcgcagcgggatacgatagcgttcggcgtgcttttgcagaacgcgcagatcgaactgcactacgttccagccgatcagcacgtcggggtcgtgttcggcaaaccaggcgttgagcttttccagcagcaggggacggctggcgatgaagaccagctcgaagtcgacgtctggcggcgtttccggttcggggcccagcatgtagaccacccgctggccgcagccttccagaccgatgcagtacagctcgccgtggcggctggtttcgatatccagcgacacccatttcagcggcggacgatagtcagggttcggcttcatgcgcgcgttgaccagctgcgagccgcgcgtttcgccttccacccacaccggggcggtgataaagcgctccatcagatagcgctccggcgggcggatatcgccttcgtaaacggtgacgccgctgtcgcggagcatcttctccagacgcatcaactggcgatgggcgcggcagtagagtccaacaatcggctgacggtggaaatctttcagggccagcggggcgaagcggagccctttctccccctgcagcagccgttcagcctgcgcccgctgcgcttcgggaataaaggcgacggactcctgcggcgggagggtgacctgcagcggaccgtcgtcggtggccagccagaaggagagctcggtgccctgcggagtgtcccgccagtgacgggtgagtaaaaatcctgctcgtggctgggtcacgggtattctcgccgataaaaaaccaggcctgattatagcctggtttcatgaggggcgctggggttttatacaggtgttcggcgctaatgttgccccggattgcggcttgcgccttatccaggctaccagatggcgcagagccctggccctgctaagcgcagcgcgagcagggtgattattggccgtagtaggctttggccccatgcttacgcagatagtgcttatccagcagggtctgctgcatagccggcagctgcggcgccagctggcggcagaaaatccccatataggcgatctcttccagcacgatggcgttatgcaccgcgtcttcggcgttcttgccccaggcgaacgggccgtgggaatggaccagcacgccgggcatctgcgccgggtcgattccctgctggcggaaggtttcgacaatcacgttgccggtttcccactcatagtcgccgttgatctccgcatcagtcattaaccgggtgcagggcaccgggccataaaagtagtcggcatgggtagtgccggtcgcgggaatagattgcccggcctgcgcccagatggtggcgtggcgcgaatgggtatgcacaatgccgcccagcgtcgggaaatcctgatacagcaggcgatgggtcggggtatccgacgagggctttttattaccctctaccacttcgccgctctccagactgaccaccaccatatcgtcggcggtcatcacgcggtaatccacaccggagggtttgatcacgaacacccctttctcgcggtcgacggcgctgacgttgccccaggttaaggtcaccagattatgctttggcagggccaggttagcttccagcacctggcgtttaagatcttctaacatagtgtgctccgaatagcaggcgagtcgggtatccctcaccccgaccctctcccggcgggagagggagaaaggcggcatggcgcccggtcggtcccctctccccaacggggagaggggaagggtgaggggacggcctcttagcgttttgaaccgtaatacacttcattccagcgcagcgcgtccttgaaggacggcagacgggtatcgttgtcgatgacggtcagctcgatatcatgcagctcggcgaactggcgcatatcgtcgaggttcagcgcatggctgaagacggtatggtgcgcgccgccggcgatgatccaggcttccgacgcggtacgcagatccggctgcgctttccacagggcgttggccaccggcagcttcggcagatcgtgcggcgttgggacggtttcgatggtattgaccagcagacggaagcggtctcccaggtcgatcaggctggcgacgatcgccgggccggtttgagtattgaagatcaggcgcgctggatccgctttgccgccgatgcccagcggctgaacgtcgaggatcggtttctcggcggtggcgatcgtcgggcacacttccagcatgtgcgagccgagcaccagatcgttaccattatcgaagtggtaggtgtaatcctccataaaggaggtgccgccctgcagaccagttgacatcaccttcatgatgcgaagcagagcggcggttttccagtcgccctcgccggcaaagccgtagccctgctgcatcaggcgctgtacggcgagacccgggagctgtttcaggccgtggagatcttcaaaggtggtggtaaaggcgtggaaaccgccctgttcgaggaagcgtttcatccccagctcaatgcgcgcggcgtccagcacgttctggcgcttgtcgccgtgaacctgcgctgccggggtcagacggtagctgctctcatattcatcgaccagggcgctgatatcgccgtcgctgatgctgttcaccacctgcaccagatcgccgaccgcccaggtgttcaccgagaagccaaacttaatctgcgcggcgactttatcgccgtcggtcaccgccacttcgcgcatgttatcgccgaaacggcacactttcagatgacgggtatcctgtttggagaccgcctgacgcatccagccgccgatacgctggtgggcctctttatcctgccagtggccggtgaccacgctgtgctgttggcgcatacgggcgccgatgaagccgaactcgcggccgccgtgcgcggtctggttcaggttcataaagtccatatcgatgctgtcccacggcagcgcggcgttgtactgagtatggaactgcagcagcggtttgttgaggatggtcaggccattgatccacatttttgccggcgagaaggtatgcagccagaccactaacccggcgcatttgtcatcgtagttggcgtcgcggcagatatgggtgatctcgtccggggtggtgcccagcggcttaaggaccagtttgcacggcagtttggcttccgcattcaggctgttcaccacatgttcggcatgcttcgtcacctggcgcagggcttccgggccgtacagatgttggctgccaataacgaaccatacttcatagttatcaaaaatcgtcattttcgtatccttaatgggtgagcgctgcctgagattgcggggctttttccgcctttgcagccgaagggagatagtgttgttccgcgctgaccgaccattgctggtagcgctgatagagttgttcgaaacgctgtgcctgcgccggacgcggctgcagggtagtttccacctggcttgccatccgctgttgggcggcaggaatatcgtcatagacgccggcggcgacggcggcgaagatagccgcccccagcgcgcagcactgatcggaggcgacaatctgcagcggacggttcagcacgtcgcagcaggcctgcatgatgacctggtttttccgcgcgataccgccaagcgccatgacgttgttaaccgggatcccctgctcggtgaagcactccataatggcgcgagcgccgaaggcggtggcggcgatcagaccgccgaacagcgccggcgcgtcggtggccaggttaaggtcggtgatcacccctttcaggcgctggttggcattcggcgtgcggcggccgttgaaccagtcgagcaccaccggcagatgctccagcgatggattgttggcccaggcttcggtgagcgccggcagtaactgtttttggctggctttgatttgctcgcgcaacgccggctgctgctgagccagctgctccagcggccagccgagaatgcggccaaaccaggcgtaaatatcgccgaaggcggactggcctgcctccatgccgataaagtgcggaaccacgctgccgtcgacctggccgcagatgcctttgaccgtgcgctcgccgacgctctctttatcggcgatcagaatgtcgcaggtggaggtgccgatgactttcaccagcgcgttaggctgcgcgccggcgccaacggcgcccatgtggcagtcgaaggcgccgccagagatggccacactctgcgacagacccaggcgctgggcccactctgcgctcagcgtgccgaccggcacatcggccgtccaggtatcggtgaacagcggccaggccagatgctggttgatgatgggatcaagctcatcgaagaagctggccggcggcagaccgccccagctctcatgccacagcgatttatgtccggcgctgcagcggccgcggcgcagatcctgcggacgcgtagtaccggagagcagggcgggcacccagtcgcaaagctctacccacgaggcggctgcctgggcgacggcgctatcttcgcgggtgacgtgaaggattttggcccagaaccattcgctggagtagatcccgccgatatagcgcgagtaatcctctttgcccggctggtgacacaggcgggtgatcgcctcggcttcctcgaccgcggtgtgatccttccacaggacaaacatggcgttagggttgtcagcgaattcttcgcgcagcgccagcacgttgccctcggcatcgacgggagccggagttgagccggtgctgtcgacgccaatgcccacgacgtcggcgcgctgttcggcgctcagcgaagcgagcacgcttttcagcgccgcttccatggactcgatgtaatctcgcgggtgatggcggaagcggttgttagcgccatcgcaatactgtccttcccgccagcgcggataccactccacgctggtcgccagctctgcgccggacgcgcattccaccgccagagcgcggactgagtcactaccaaagtcgaggccaatcgcaattgccatcttgttactccatgcagaaatcattcatgcagcaacagtagatatccccggcaaaatccgtcaggccggattcgctaatcttatggattattttgctgttaccttgcaaagtgtgacgccgtgcaaatattcgatgtggacttttctgccgtatttatagacacttttgttacccggcatatcacggtggaatgcacgctactggcgcttttttcgcttgctgtgcgggtttttcgccaaattcccaccgccgtcgcagtcgcgacagggccgagagcgataaaatgatgaatatggacaattggtgccactgataccttcggggagaaccacgcgtatggccgaaacgcaaaacgatccgctgctgccgggctactcttttaacgctcatctggttaccggcctgacgccgattgaggcgcagggatacctggatttctttatcgaccgcccgctgggtatgaaaggctatattctcaatctgacgatccgcggcgagggggtgatcaacaaccacggcgaacagtttgtctgccggccgggcgatatgctgctgttcccgcccggggaaattcatcactatggccgccatcccgacgccagcgagtggtatcaccagtgggtctacttccgcccgcgcgcctactggcacgagtggctcaactggccaacgatttttgcccagaccggctttttccgtccggatgaacagtggcaggcgcgctttggcgagctgttcggccagatcgtcgatgccgggcagggggcggggcgctattccgaactgctggcgataaacctgctggaacagctgctgctgcggcggatggaggcgatcaacgaatcgctgcatcccccgctggacaaccgggtgcgcgacgcctgccagtacatcagcgaccatctggcggacagccattttgatatcgccagcgtcgcccaacacgtttgcctgtcgccctcgcgtctgtcgcacctgttccgccagcagctgggggtcagcgtcctcggctggcgggaggatcagcgcatcagccaggccaaattgttgctcagcaccacgcggatgccgatcgccaccgttgggcgcaacgtcggcttcgaagatcagctctatttttcccgcgtgtttaaaaaatgcaccggggccagcccgagcgaattccgcgcgggttgtgaataaaaagtaaagaaagtgaaatgatgacccgcttaaatgtcacagccagtaaactattaagacaattgatggcttgacgacggcgcgatggcttcggagaatccgggcttcgttttttaaccgggtacattatgcaagcattgctcgaacactttattacccaatccacggtctactcattgttagccgtgatgctggtggcctttctcgagtcgctggcgctggtggggcttatcttacccggcacggtgatgatggctggccttggggcgctcatcggcggcggcgaagttaacttctggcaggcgtggctggcggggattgtcggctgcctgctgggcgactggatctcattctggctcggctggcgctttaagaagccgttgcaccgctggtcgtttatgaagaaaaaccgcgccctgctggagaaaaccgagcatgcgctgcatcagcacagcatgatcaccattctgattggccgctttgtcggaccgacgcgtccgctggtgccaatggtcgccgggatgctcgacctgccggtggccaagttcgtgctaccgaatattatcggctgcctgctctggccgccgctctatttccttccgggcatcctcgccggggcggcgattgatattccggctgatgaaaacagcgccagctttaaatggctgctattgggggcggcgctgctggcctggctggcgggatggctgtgctggcggctgtggcggagcgcgaaaacctcaggcgatcggctgacccgctggctgccgcgcggccgactgctgtggctgtcgccgctgatggtcgcgctggcggctacagcgttaacatttgtcttccgccatccgctgatgccggtctatctggcgatcctgcataaagtcatcgcgcgctgatccccatcaaatgcgaggcgctgctgtggccgcttaacagctcggcggtggcgccatcccagacaatgcgcccttcggcgaccaccatcgagcgcggcgcgatgcgcgcggcgtcctctacgctgtgggagaccatcagcagggtgagctgctgctgctcgcagacatcggcgaccagggacagaatctcctggcgcagcgccggatcgagcgccgagaagggttcatccagcagcagcaccggctgctggcgcaccagacagcgggccagcgccgcgcgctgccgctgaccgccggagagctcgccgggcagacgttccagcagcgcatcaattcccatctgtccagctatcgccgtgacctgcgcctgctgctcgcggttcagtttaaggcctgggtggatgccgaggctgatattttgtcgaatggtcagatggttaaacaggttattctcctgaaacaacatcgagaccggacgctgcgccggcggcgtcgcgttatgcgcctcgccgttaatcagcaggctgccgctggcgggcggcagaaacccggcgatcagattcagcagggtgctctttccggcgccgctggggccgagcaccgcgatgcgctccccgcgcgcgacgtcgagggtgaagcgcatcggcagatgctggtatagccaggtcacatcattgagttttagcatcacgccccggaagtttttcaatcagcgtaaacaacaagaaacagagcagcagcaggagcagggcggtgacggccccgtcctggctgcggtaggcgcctatctgctggtacagatagaaaggcagggtgcggaacgcctcgttgccgaacagcgccaccacgccgaaatcgccaatcgacagtacgcaggcgaaggcgagcgcctgggccagcgggcgccggagagcgcgaagctcgaccacccgcagccgggcaaagccttcaatacccagcgactggcacagcatgctgtagcgggcggcaatgtcgcgcatcgggttttccagtactttcagcgcataggggatcgccatcagggcattagtgaagatgacgatgccgtcggcggactccggcaggccgatagtgttattgagcagcaggaagaagccggtcgccagcacaattcccggcatcgcaaggatcagcatgccgctcagctccattgcctgcccggccaacggccgctggcgagcgcgcagctcccgactgctccataacagcatcatcgtcagggtcacgctcaatagcccggcggcgatggcgatgcgtagagaggtgctcaatgcctgccagagcgctggctgcgccagcacgtccagcatattacggttgatcccgtcgacgatgaccgccagcagcggcgggagcagcagcagcagggcggcgccgatcagcaacccgtcgctcaggcggctatgcaggcgatcgtcagggtcgcgccagccgcgcacatggctgacgccgatggcgacggctttactcagacgctggctaagcagcaccagcccaaggcagcagagcatctggatcagcgccagcattgccgctcgcgccggatcgtagtcaaagctcagcgcctggtagatagccagctcgatcgtggtggctttcgggccgccgcccagcgagagcacggtggcgaagctggcgaagcagagcataaaaatcagcgcggcgacggcgggaatgtgccggcgcagccacggccattcgacgaggcggaagaaggcatagccgcgcatgccaagctgggcggcaatttgccgctgctcgccgggaatgttctccagcgcctgcagcagcaggcgggtcgccatcggcatattgaaaaagacgtgcgccagcaggatgccctgcagaccgtagggcgagaactcccattgccagccgagcgcgtgaaatagtgaggccagccagccctggcggccatagacgctgaggataccgaacaccgccaccagcaccggcaggatcagggtcatcgcgcacaggcgcagcagcagcgtacggcccgggaagcgacgccgataaagcgcgcgggcgagaaagatggctggtcccaccgagatcagcgctgacagcgacgcctgccagaaggagaagcggaccacatgccacaggtagctatcgctgaagaccgattgccagcccgcgccgggggcgctaaaccacagcgccagaaacgccgccagcgcgacagcgcacagcagcgtagcggcgaacaggcccggcatcagcccgcgaaggtttagcggctgacggcgcgttgccatgcgctaatccaggtttgacgctcgctggcgacttgctgcggggtaaaggacagggtggtctgcggcttcaccagggtatcaaacccggccggcagggtgaccttggtcaccggatacatccagttgccggtagggatggcgttctggaagccaggagataccataaatttgaggaatttttccgccagttccggctgcttgctggcggcggtacgcgcggcaacttcgacctgcagatagtggccctcggcgaagttcgccgccgcatagttgtctttcttctcttcaatcatgtggtaggccggcgaggtggtatagctcaacaccaggtcgctttcccctttcaggaacagaccataggcttcgctccagcctttggtgacggtaacggttttcgcggccagcttctgccaggcctcgggcgcttgatcgccatagaccttttgcatccacagcagcaggcccagtcccggggtgctggtacgcggatcttcatagatgacccgccatttttgcgggccctcgaccagctctttcaggctcttcggtggattagccagtttgtttttgtcatagacgaaggcgaaatagccatagtcgtagggaacaaaggtgtcattatcccagccgcccggcacgctgaccgcgctggcgggtacgttgcttttggcaaacagtttactctgcgccgcggcttccagcaggttgttatcaaggccaagcacgacgtcggccttgctgtttttgccttccatgcgcaggcgattcagtagcgaaacgccatcttccagcgcgacgaacttcagctcgcagccgcactccgcttcaaaggcttttttgaccgccgggccggggccccagtcggcagagaaggagtcataggtatagacggtaagaacaggcttagccaaagcgggcatggcgaccagcgccagcagcgggagtaattttttcaacactttgcacctcagaaaaaaggggtggcaaaggattttgagtgagcctcaaatcccttcgccggcgttatccggatcaggttcgacgggtattttctcagcccatgcgcttcatccttcaagccgcatctgcgttagcttcgcgcgttcaccccagtcacatagttatctatgctccaggggattcatccgcttgctgccttgatgcaacttgaatgatattgcgtatgtttattagcaccccgttgagaacggccttagtgtaatgattttgtcagatgacggaaagcgcttacggctccggcggcgcaaaccatgcggatttaaaatcgaaccagccgagggtattcatcctcacgccgcgcatactgcgctgaccctgaatcatcagccagtggtggatcagcggcacgatatgttgcccggccagcagccgctggctccaggtggccggattaaactctcctgctcgccagcggcaggcgtctgcctgccagtcaatgggaatgcagcgctgaatcagcgggacttcgtacagataggcgaagagcgaaaattcgatcggtaaggtgaagttcacgctgttgagccagatatcgctgaccacctcgccgcgatgccaggcatcgtactccagctcctggatctccagctttacctgatgcgccgccagcaggtcgcgcatgatcccgccgatcacccgatgttcgacgtgatcgcggtagtaggtaagggtgactgtctccagccccgccggcttctcgcaggcgtggttgctggcgtgatgccagcgcggcagcaggccgtaggcgggaaaccagttgccctggtagtgttcgcccgcatggtagagcaggttggcgggctgaaacagatagcttagccagcggcgcaccgcgtcgttggcccccagcgggcttcgcgagtcgaacagcaggtaatagcagccctcttccaggcgactctctaccgctttttcgctttcggtattgccctgcagcgtcaggccgccgttgggctcttcgctaatctccggcagcacccagacgttcacctcatcgatcagcgcccggtagccaaaatagtcctcaaaggcatggatcttgagctgattctggttgttacgcaccacggcataggggccggtgccgaccggcatggaggaaaagtggttcatggtctgccactcctgcggcagcaccatcgccggcacctgccccagcagccagggcagccagcggtcgggctggcgcagatgaatatccagggtccaggcggtgggcgattcgatgcgttcgatatgtgaatagagcggcagggcattgctgcgctgcagagaggcgatcacatcggccatctccagctcacggccatggtgaaaatggatgccgggacggaggaaaaagcgccagtgggtgggggtcagctgctgccagtggtgggcaatatcggcttccagttccccattttcctcatttactctcgtcagggcgctgaatatttgccgggcaatatgcgtttccgaacgccgcagcgcgctaccgggcagcaaattcttcatcggacgatagtagagcacgcgcaggatgtgccgcccctggcggaagctgcggccgagatgcgagaccagcatctggcggacggcagccttatcgccgaccaactgcaccagctgatcgatgcgatcctgctcaaggagatcttcggcacgttgctgctgcagggcgaggccggtatagagaaaggttagccgcgaacgcttgccgcggcctgcctccgcttcccaggtcagccagccgcgggactccatcatattgagcagggtgcgcatatggcggcgcgagcagctcagcatttccgccagctcgttaagggtggtctcctgcgacttgccgtcgcagcactgccataggcgaatgaactgttgttgcagacggccggaagacataaaaggggaactcctgcgcaaaactcagcaatttattacttcctatattaagccaataatgaatcccgatgaagcgaggaggtgaatatgatgaggtctaccgcaaaatcgttctaccaacgctacttttctgcgacgcaggaagcgtcctggctggcccgcctgatggcaggacgacagcaggaaattctgggggaactgatgcagtggggagtgacgtcaacgacctctgatcattgacttgcagacatcatgtgtgactgagtattggtgttatactcgtcgtttttcaaactgcaggtgcgctgtcgatgcttcctgggccgtatgttcgggctgcgtgattcgcctctacgggactcaccttttcagggccagcgcgagcgcggcgcaaaatggttaaccgttttgtcctgcagcatgaaatccatagagtatagaatcacccgccagcagaaagcctctgctggcttttttcgttttcttcgcgtgtgttaaggacattccatgctgtggttgatgacgatgggacgacggcttaacggcgtctatgccgcctttatgctggttgcttttatgatgggcgtggcgggcgcgttgcaggcgccgacgttgagtttgtttctcagccgcgaagtgggggcgcaaccgttctgggtgggcctgttctataccgtaaacgccatcgccgggatcctggttagcctgtggctggccaagcgctccgatagccgcggcgaccggcggcggttgattatgttctgctgtctgatggcggtgggtaatgcgctgctgtttgccttcaaccgccactatctgacgctgatcacctgcggcgtgatgctggcatccattgccaacgccgccatgccgcagctcttcgcgctggcgcgggagtacgccgacagctcggcgcgggaagtggtgatgttcagctcggtcatgcgcgcccagctgtcgctggcttgggtgattggcccgccgctggcctttatgctggcgctcaactatggcttcaccaccatgttctccattgcggcgggcatttttgtcattagcctcgctctgattgccatcaaactgccttcggttccgcgtgtggaacagccctcggaggaggcggcggcgctagcgcaggccggcggctggcaggacaagaacgtgcgtatgctgtttatcgcctccaccctgatgtggacctgcaacaccatgtacatcattgatatgccgctgtggatcagcagcgatctcgggcttcccgacagcctggccgggatcctgatgggcactgccgccgggctggagataccggcgatgatcctcgccggctactacgtaaagcgctttggcaaacgtaaaatgatggtggcggcggtggccgccggcgtgctgttttatgccggactgatcctgtttcatggtcgcgcggcgctgctggctctgcagctgttcaatgccatctttatcggcattatcgccgggataggcatgctgtggttccaggatttaatgccgggacgggcgggagcggcgaccaccctgttcaccaacagtatttccaccggcgtgatccttgccggcgtgatgcagggggcgctgtcccagagctatggtcacgccagcgtctactggacgatcgcggccatttcgctggtgacgctgtttttgaccagcaaggtgaaggatatctgactactcgccccggcatcgccggggcgaccaggcctacttgagttcgatacgcttaatgtcgccgatgataaaaatgtaggcaatcaccccaatcagcgccgtcaggccgacgtagatcagcgcgtaaaagaaattacccgtggcggaaataatcacaccaattatcagtggtgcgataatcgaggccatattggcacagaaattaaatatgccgccggtgaggcctgccatattttccggggcaatatcagaaattaaggcccagcccagaccgaccatcccctggccaaaaaaagccaccgacatgataataattacggtgctattggcgcttacccaattcgccgcgataatacagctggacagcaataaaccggaaattattggtaactttcgactgatgttgacggagccggttcgcttcaacaaccggtcggagatccagccgccgaagaggatgccaatcgcggcggcaaggaagggccaggtggcgaagaagccgacgtgcagccatggaagatggcgctcgttggcgaggtagctgggaaaccacgtcaggaaaaagaccagtgtggtgttgccggcgaactgacccaggctggcgccgaggatctggcgacagcccagcaggcgtctggcgtcacgccagttaaatggaacgttctggattttattgttaatgccgtttgcgccgatatactccagctccgcttgattagccgtgcgcgattcatgcggttcatgataaaaacgccaccacactaaagtaaataaaatacctaatccgccggtgaggaaaaaaagcgttctccagccatgatgttcgagaattaaaaataacagcggcgagaaagcggccagccctatatattcaccaactgtatacgttgccgttgcccgcgcgcgctcatgctgagggaaccaggtgctgacgatgcggctgttggccggaaagcagggcgcttcgctgacgccgagtcccaggcgcagaagcagcagggattttaggccgagggtgaaactttgcagcagggtaaacagcgaccagaagaaaattgacagggcataggtcactttgttgccaaagcggtctaaaaacatcccgccggggatctgcgccagcgcataagtccaggcgaaggcggagaagatgatgcccatcatcgccggatcgatatggatttctttgcttaactgtggcgctacaatacccaggatggtacggtcgagataattgatcatcgttccgacggagagtagcagcagaataactatccgtacgcggcttctttttttcgcccccgatgtggaagtgaggacttcctgagagtttgacatactcatagcgagttcctttaaagtttaaaatatttttgcatatattctaatatgcaaaaatatctcaaggagctataggtagtatctatgaatggcaatgccttgtggcacattcaggcccttcgtcaaataatatttgatgtaacgccgatatttacccgttcatgcgcattattggtggcttgcatggtatattagcgtcagtgtatttattcttatattatacgggtaaaaataatgaacctaaagcaactttattattttaaacgtctgtctgaaactgagcattacaccgaagccgcctccagtctgtgcatcacccagccctcgctaagccacgcaatatcggagctggagaaggagttaggggtcgcgctattcgccagacaggggcggaacgtaaaaattacccaaaacggcaagcgttttttgccgtatgttgaagatgcgctggcctcgctggagaacggacgcatgatattgcaaaaaaatggcgctgagaataaagagaatattcgcatcgcctttatttacacgatgggggagtatgttgttccacagttaattaataaatattctctttcacctgaatgtcacaatgtgactttttcttttactcaagggacatcgctgacgctgttgcaggagctgaaggccggaaaagtcgatctggcgatctgctcttatattgccgatgaacccgatatcgattttattccggtgatccagcaggaactggtggtggtcacggcaaaggatcatccgctggcccggctatatgaacatgaagtcgatctggtggagacgattcattatccgtatatctatttttcagaaaatagcggcttacgtccgtttatcgataatgtatttatgcagcaaaagctgatgccggagatcgcctgctatgtggatgaggatacggcgatggccgggctggtgagtattgactacgggatcgcgattatgccgcgcatcaccgcgctctcctattacaacgtccatatcctgaagattaaaaacaccatccccccccgctatatctatctggcgaccatgaaagacaaggggctctctccggcgctggagtcatttaaaaatgtggttatccacgacagccagaagatctgttaacggatggcccggatgtgacctccgggccatccggatatcaggagagaatatccatcacttcacgcagcttagcgatggcgatctgccccggcgcggaggcctgaccaacggtaccgaaggtcatcgccgaaccgaacaagcgcccggtgacccggctaacgccaccggatttgcccatcgacatggtgatcagcggacgcgtcgcatacttctctttcatagtcagcgtggcggcgagcaaggtgagtacgtcctgcggcgactgcggcatcaccgcgatcttcggcagatcggcccccagatcctgcatgcggcgcaggcgatagataatatcttcctgagcgggggtcttatgaaaatcatgattactcatgatcaccttgacgcccgcggcatgcgcatcgtcaaccagcgcgcggatctgcgcttcatcattgaacagttcgatatcgataacatcaaccagtccactgcgtgcggcctcgcggttgagcgcaaaataggcttcgtcgctgagctcggtttcgccaccttctttcttactgcggaaggtaaatagcagcggaagcgctttcagcgcgccacggatttccgccagcgcggccatcacctgggccatctctctgacctgggcaaagtggtcaacgcgccattcgataatatcagcgccggcatcgaccaggccgtgggcgttacccagtatctcatccagggttttaccgatcagcggtacacaaatgagggtttccccttcctgaaaggtgatgttctttacggttactgcatttgtcatgtaggtatccattatttttcgcgttgtacttcaggcggtgactgcggtgcgtgacactttttgcgccgcccgagcctgcagttgacgatagccgatgtacagggcgatcacaaagccgataacggcgatcagaaaatcaaaccacataatgctggcaatactgatctgcgaaagctttgcggtgatcaacgggatcgtgaagctggcgatactgccggcggtgtagaagatgccggttgctttgccttttccgttcgggaagctcatcgccatgattgtcgcacccagctgcagcactccgccagcggcggcaaagccgatgacaaaagcaaagccggtcaccatcatcggcgtcgggaacaggcacaccaacagcagcgaaatcatcgacaggccagtataaataatcatcgcaatggccgagctaaacacctctttgacgaaggcggcagttacaaagacgcagaccagcgagccgacggtatagatgctaagcagtttaatcgccgaggcatagggcaggccgacgacgaactggccgtactgcgccagccattggctgaccagatagaaggtcgccatgccgatataaccgtacagggtgaagatcaccatatccagcttattagcctgtggccggacggctgtttccgcctgtgccgtaggggcttcctcttttttcgccgcctggctgtcagggaacggcattttaagcagataaatcccgctcagtacaaagagcgctgccgcaatcacgaacgaccagccgaaccacagatttgcccatatcaggaagctgataatgaacggcaacaggaactgccctgcagagacgaaggctttgatcagcacgttggcccggctggcagagtgcgggaaagattccatcagcgccggataggtaccggagtcgaggaagctgttcgccaggcccgccataatgccgaacacgtaagccagatagatatttttggtcagcaggatgccgacgaaaaagatcaggtagctaaggatcccaagatagataaagggcttgcgaccgaagcgatccgagagaaatccggtcacgatggtcgctaacttaccaatacctaacgaagatataacgatcgatacgccggctttgtctgttccccactgttcctgaagatgggccatgttgagggtgattaacagcacccccataccgtggatcaggtagttgagatacagccctgccgcagtagggatgtatttatttttcatcattcgcctcttagaacagaatgctcttgatgtaatcaaccggcatctgtttgcccgtccagatttcgaacgcgcgcgcgccttgccacagcatcatccccaggccgttcagcgtgcggcagccttttttctcggccacttccagcaggtgggttttgcgcgggttgtagacgacgtcggagacgatcaggtccggacgcaggaagctgtcgtcaggtagcagcatctggccttcgaacggcttcatgccgaccccggtggcattggtcaggatcacgctgctgtcaatttcggcgcgcagcttgtcatgatcgtcgagatcgaacagatggatctcgcagtcggtgttgtggcggatcttggccacggtttcttctgcgttggcgaagaatttatcgcggcggttgaagatggagatcgccttcacgccatccagtgctgcctggacgcagagcgccgttgccgcgccgccggcgccgagtacggtcatcttcttgccgatgatatcgataccggcttcgctaagggcgcgcatgtagccggtgccatcggtgatatgtccggtcagtacgccgtcgtcgttgaccacggtattgaccgccccgaccagctgtgccgccggcgacagtttatcgagatactggcaaatctcggttttgttcggcatagagacgttaaaaccgcgcagcttcatcgcccggaagccctgcaccacgtcttttagctcctggttaccgacttcaaaagcgagatagacgtagtccagcccgagatgggcgaaagcctcgttgtgcatggtgggcgacatgctgtgacgaatcggggtggcgatcaggccaatcagctcagtgtgtccagtaatacgttctgccatgacaaaaatcctcaataagttagaaagggaattcgttgtgcttcgcggctgcccagcgcacccatgtcttccagtgcatccagtacgttgcggccttcgcggacgccatcgataatgcgtcgcgccatcacgctgtcgccgatgttcatgattttgacgttattggcattggcccagcgctcgatctcgtcgagacccgtccggttggcgcgcatccccagacagacaaagccgtagtcgaagggaatatcgaaggtttgctgtgtatttttcacctggaaatggtcggcagcgaccgccatcagttgggtattcatgtgctgttcgacctggtgctcgtcgagcatggtcaacatggcatttttggtaatgatgtcgagatcgcgaccggcggcgtcctgcatctcgattagcaccgcctgtgcgccgcgagcggtaaagtattcgataacgtcaaggccaacggcgccggcgccgactacggcgatgcgtttgcccttgatatcggtaaatttcgccagattgtcgatcatgccggtaatggaaaagatcttgccgttctcgacgtcaatgttttcccgcaagccttcaatgggcggcagcagcggcgttgagccggtggcgttgacaatcagatgcggacgcagggcggaaactgaagccacgtcggcccgcttgccgatctgcagcatcaggttgtccagcgaggcgatacgatttttcataaactgcgggaaatcagcgatgcgttttttctccggcaggcgggagatttcgctggcgaggccgccgacgtggtttttcgcttccagcagccaggtatggcaaccaacttccgccgcggtgcaggcggcttccatcccggcggtgccggcgccgatgaccaccacgttagtgtcgcgattcacgcgccgcattttataggcgtcaccgtgaataatatccgggttaatcgaacagcgcagcgggcgcgagcgggcgatgcgatggtcggcgcagccgatgttgcaggagatacatttgcgcatcagacgctcttttccgccttgcactttctgcacccactccggctcggcaatcagaccgcggccaatggcgataagatcggcatcgccgctggcgaggatatcttcggctacctgtggagtgcgaatattgccggcgatgaccgtgggtttatggaatttatcgcgcaccgcgcgggagagatagcgcttccagccatcctccagcgacatctgatcgatttgcagattcaggttgtcgttctgcgccgcagagacgttgatgatatcgaccttctcctggcagagctcaagaatacgcagggaatcttcgagggtattgccgcccttgaggaagtcgtcggcgctgatgcgcagactgaccggaaaacgcggccccacgcaggcgcgaaccttatcgacaatcagactcagtatccgagtgcgattttcgacgctgccgccaaattcatcagtgcgcttattaaacagcggcgataaaaactggctaattaaataggagtgaccggcatgaatttcgacgcagtcaaaacctgcgcgccgaacgcgctccgcggcgtcaccaaatttctctaccgcatgataaatttcctcatgggtcatcggacgcggaatattaccgtgcttcttcgacggcgttgtagaagaggagagcggcgtctggccttccagtcggtaggcataagcggaagcgccggcatgatttaactgaatggatacgcaggcgccatgtttatgcagggtctcggttaatttaaacagccgtggaatatattgatcgttatcgatgcgcagttgggtggtgccgttggaggcgaaggggaaatcaatacaaatattttcgatggtgataagcccggtgccgcctttggcccgcagttcgtagtattccagctgttcctgcgacacctcgccattgagcgtggccatattggtgcccatagggggcataataatgcggttttttaacgtcataccgttgatggtcaacggactgaaaaggtgcggatagtggctcatctcttctctccacaggaggccgggaggccgatatgcggggcccaggcgtgtccttagttaatatttctctgtggcaaaagataacgaggggaaaaatcgaaaaataatgcttttttttgtgcatagccataggggttctctatgagattaacgctttcttcacattcttatatttttatattaaacactcgtgccttatttttacttgcagtgcagggaaaatacataaacagtgctggagaaggggaggaaagcggaataattcttctttaggcggtagggcagggtggcggtaaggtctgacaatcagcaaattaaaattagtttttgtgcgtgagatcgcaattttctccgcaataaaataaaaagcccgatcaaatgaccgggcccaaaggttaattcataaacgccggcagcttgcgttcatagtcggagatcgccgcttcatgctgcagcgtcaggccgatgctatccaggccgttgagcatgcagtggcggcggaaatcgtcgatcttaaagctgtaggttttatccccggctttaactacctgcgcttccagatccacttcaaacgtaatgcccggattggcctgcaccagcttgaacagctcgtcgacctgctcgtcgctcagggtcaccggcagcagctggttattgaagctgttgccgtaaaagatatcggcaaagctcggggcgataacgaccttaaagccgtaatcggtcagcgcccacggcgcgtgctcgcgcgaggagccgcagccgaagttttcccgcgccagcagtatcgatgccccctggtactcaggataattcagcacgaactccgggttcggctgttgacctttatcgtcgagaaagcgccagtcgttaaacaggtgcgcgccaaagccggtgcgggtgaccttctgcaaaaattgcttagggatgatcgcgtcggtatcgacgtttgcagcatccagcggaaccaccaggccggtatgttgggtaaatttctctgccatgatggtctccttacttcagattacggatatcggcgaaatggccggtaacggctgccgccgcggccattgccgggctcaccaggtgcgtgcgtccgccgcggccctgacggccttcaaagttacggttgctggttgaggcacagcgttcgcccggattcaggcggtcattattcattgccagacacatagagcaaccaggtaagcgccactcaaagccggcttcgataaagatcttatccagaccttccgcttccgcctgcgctttcaccggaccagaacccggcaccaccagcgcctggacgcccggcgccactttacgccctttagcgatttccgccgcggcgcgtaaatcttcgatgcgcgagttggtgcaggagccgataaacactttatcgatagcgacttccgtcagcgggatcccggatttcagccccatataggccagcgctttttcggcgctggcgcgttccaccggatcgctgaacgacgctggatcggggatgttatccgtcaccgagatcacctggcccgggttggtgccccaggtcacctgcggggcaatttccgccgcctgcagcgtcaccacggtatcaaacgtcgcgccgtcgtcggttttcagggttttccagtacgctacggcatcgtcaaaatctttgcctttcggcgcatgcagacggccgcgtacgtaattgaaggtggtttcgtccggcgcgaccaggcccgctttggcgcccatctcgatcgccatgttgcacagggtcatacgcccttccatgctcagatcgcggatcgcttcgccgcagaactcaaccacatggccggtgccgccggcgctaccggttttaccaatgatggccagcacgatatctttggcggtaatgcccggcgccgctttgccctggacttcgattttcatggtcttcgcgcggccctgtttcagggtctgggtcgccagtacatgctccacttcggaggtgccgataccgaacgccagcgcaccgaacgcgccgtgggtggcggtatgggagtcaccgcacacgatcgtcatccccggcagggtaaccccttgttccgggcccatgacgtggacgatgccctgatacgggtggttcaggtcgtacagttcaacgccgaactctttacagttcttaatcagctcctgcatctgaatgcgggccatctcaccggacgcgttaatgtctttggtctgcgtcgagacgttatgatccatggtagcgaaggttttacccggctggcgcacctggcggccatgggcgcgcaggccgtcaaacgcctgcggagaggtgacttcgtgcaccagatggcggtcgatatacagcagcggggtttcgttctgcgcctcatacactacgtgcgcatcaaataatttttcgtataacgtcttcgccatgattacaccccttctgcgacatagcgggcaataatatcgcccatttcatcagtgctgaccgccgccgtgccgcgcgctaagtcgccggttcgaaccccttcttctaaggcgcggttgatcgcgttttcaatggcggtcgccgcttcgtcagcgtcgaggctgtagcgcagcagcagagccagagagaggatctgcgcgatcgggttggcgatatttttgccggcgatatccggtgcggaaccgcccgccggctcgtacaggccaaaaccttgttcattgaggctggcggacggcagcatacccatcgagccggtgatcatcgcgcactcgtcggagaggatgtcgccaaacaggttggagcacagcagcacgtcgaactgggacggatctttaatcagctgcatggtggcgttatcgatatacatatgcgccagctcaacgtccggatactccttgccgatctcgctgacgatttcgcgccacaggatggaggactgcagaacgttggccttatcgatggaagtcactttgtgacgacgcttgcgggcggattcaaaagcgatgcgcgcgatacgctcgatctcaaagcggtgatacacctcggtatcaaaggctttctcatgctgaccgctgccttcgcggcctttcggctggccgaagtagatgccgccggtcagttcgcgtacacagagaatgtcgaagccgttagcagcgatgtcggcgcgcagcgggcagaactcttccagcccctgatacagtttggccgggcgcaggttgctgaacagtttaaagtgtttacgcagcggcagcagcgcgccacgctctggttgttccgccggcggcaggtgctcccatttcggaccgccgacggagccgaacaggatcgcatccgcctgctcgcatccggcgacggtcgcctgcggcaggggagttccctgacggtcgatggccgccccgccaacgtcatactggctggtggtaatgtgcatggcaaaacgttggcgcacggcttccagtactttcatcgcctggttcatcacttccgggccaatgccatcacccggcaaaacggcaatatggtaattcttcgacattacacggtttccttattgttctctttattctgagctttgcgttgcaattctttttcgacttcggcggcgcgccagatgttgttcagcacgtgaaccatcgctttggctgacgactctacgatatccgttgccagaccaacgccatggaagcggcggccattgtagtcaacgacgatatccacctggcccagggcgtctttgccgtggcctttcgcgcttaagccatacttcactaattcaatgttgtagtcggtgacgcgattaatcgcctggtagatagcatcgaccggaccgttgccgttggcggcttcggttttgatctcatccccgcagaccagtttgatcgaggcggtggcgatatcgctggatccggattggacgttgaagtaatccaggcggaaatgctctggctcttcctgctgcttgttgataaaggccagcgcttccagatcgtaatcgaagacctggccttttttgtccgccagcttcaggaatgcgtcgtacagatgatccaggttgtaatcgctctcctggtagcccatctcttccatccggtgtttcaccgccgcgcggccggagcgggaagtcaggttcagttgcacctggttcaggccgatagattccggggtcatgatctcgtagttttcgcggttcttcagcacgccgtcctggtgaatgccggaggagtgggcgaaggcgccggtgccgacgatggccttgttcgccgggatcggcatattgcagatctggctgacggtctggctggtgcgccagatttcatgatgattaatgttggtgtgcacgttcatgatgtctttgcgcactttgatcgccatgatcacttcttccagcgcgcagttgccggcgcgttcgccgataccgttcatcgcaccttctacctggcgcgcaccggcgtggaccgcggcgagggcgttaccgacagcgatgcccagatcatcatgggtgtggacggaaataattgctttgtcgatattcggcacgcgatcatacaggccgctgatgatgttggcatattcgaacggcatggtatagccgacggtatccgggatattaatggtggtggcaccggcgttgatcgccgcttccacgacgcgagccagatcggcaatcggcgtacggccggcgtcttcacaggagaactcaacgtcgtcagtgtagttgcgtgcccgcttcaccatatagatcgcgcgctcaataacctcatccagcgtactgcgcagtttggtggcgatatgcatcggcgaggtggcaataaaggtatgaatacggaaagcctcggccacttttaacgattccgccgccacgtcgatatctttctcaacgcagcgcgccagagcgcacacgcggctgtttttaatggtgcgcgcgatggtttgcaccgattcaaaatcgcccggcgaggataccgggaaaccgacttccattacgtcgacccccattcgctcaagggccagtgcgatctgcagcttctctttgacactcaggcttgcctgtaacgcttgttcgccatcacgtaaggtcgtatcgaaaataatgacttgctggctcatggtttggatccttattctgtgtcctggcgccttgttgacgagcataaaaaaacccgcgccaaggcgcgggttttatagtcttgctggaagatgacttaacgctgaacgtcgcccaacagcctaccgcgcaaatggcatgcgtttagtagtagtaggctggtgatacgagcggtgcgaatcattgcgtcaaactccagatgaaatcgttatgcttttagagttactggatagccgttttaaagtcaacccctggcatggaaaaagcgttttgggctgactaaatgaattagcaaaatgtgctgatggaagccccattttgccgaagatcctattttggaccgaaggcggtttatccccatttgtttcatttgaaaaagtgctttgcattcaaggcatcgtcgaacaggtgtcgccaatgaagggacaaaaaacggtatctggatgaaaatattaaatttatttttcctgtgaatgtattcgaacgctagcggattatttttcaatgataaggatttgttaattttatggagggaaaaataaaatactttattattgcttaagttacagttaactcgtggtgctgtttttatttttatggattatggttacacttatcatcattaagtaatcagtatggtttgagcggctcaattttttgatcaggaccgtttcttcactgccactcatagccttgatatattcctaaaaatttcttttgctattttgtaaatgtcatttgcatggtaaatgatattttcggcgctaattatagcggtttagtgaagggaattcatcgtgacggtggaattagatatgttaattgaaactccagaatataaatcagcccccggacaggaagtcgttaaacctcaactacggatggttgatctcaatctgcttaccgtttttgatgcggttatgcaagagcagaatattactcgtgccgcccatacgctcggcatgtcacaacccgcggtgagcaatgcggtttcacgactgaaagtgatgtttaatgacgagctttttgtgcgctatggccgcggtattcagccgacggcgcgcgcctatcagctgtttggctcggtacgccaggcgctgcagctggtccaaaacgaattgccaggctccggttttgaaccgctgagcagtgagcgcgtgttccatctgtgcgtctgcagcccgctggataacatcctgacgtcggttatttttaataaagttgcagagatagcacccaatattcatttagtctttaagtctgcgctgaatcaaaatacggaacatcagctacgttatcaggaaacagaattcgtaatcggttatgaagagttccgtcgccctgagtttgcctgcgttccgttatttaaagacgaaatggtcctggtcgccagtcgcaaccatccgcgtatttccgggccgatgatggaggcggatatttatcgcgaggagcatgccgccgttgctctcgaccggtatgcctcatttagtttgccgtggtatgacacggccgataaacaagcgcgtatcgcctatcagggtaatgcgatggtcagcgtattaaacgtagtatcgcaaacccagatggtggccattgccccgcgctggctggcagatgaatttgctgacaagcttgccctgcaaatattacctttgccgttgaaggtcaacagtcggacctgctatctctcctggcacgaagccgctggtcgtgataaaggccaccagtggatggaagagctgttggtggacatttgcaagcgctgacccaacgacgatagatagcaaaggagcttcggctcctttttttatatgacataaatcaaataaagcagaattttattctgtttaccttgcgcgaggggttcgttgtgttcgtgaaaaatggatctattcctgttatcaccctttttcgccgagtatttaccattctcttttcttatctctgaagcaattcaccatattttcccctcaccgctttcttttcttcttattcaagaaataaggcctcagctgcggcgaattgcctgcctgctggcgagcagttatggtagtggcatgcagtacattcacctcaatgcggaggaccactccttcgcatcgtgcgagcgcgcggaaattgagttccgctgtcgtaaaacaataagcctggaggcaaaccatggagatgttgtcaggagccgagatggtcgtccaatcgcttgtcgatcagggcgtcaagcaagtattcggctatcccggaggcgcagtcctcgatatctatgatgcgttacatacccttggcggtatcgatcatgtgctggttcgtcacgagcaggcggcggtgcatatggcggatggcctggcgcgggcgaccggggaggtcggcgtggtgctggtgacctctgggcctggggcgacgaacgccatcactggcattgcgacagcctatatggactctattccgttggtgatcctctcggggcaggtagccacctcgcttatcggctacgatgccttccaggagtgcgacatggtggggatttcccgtccggtggtgaagcacagtttcctggtgaagcagaccgaagatattcccggcgtgctgaagaaagccttctggctggcggccagcggtcgccccggtccggtagtggtcgatctgccgaaggatattctcaatccggcgaagaagctgccttacgtctggccggacgcggtgagcatgcgctcgtataacccaaccaccagtggccataaagggcagattaaacgcgccctgcagacccttgtggccgcaagtaagccggtcgtctacgtcggcggcggggcgatcaatgcgcattgcgaacctcagctgcgcgagctggtggaaaaactgaagctgccggtggcctcatccttgatgggacttggcgctttcccggcgacacactcgcaggcgctggggatgctggggatgcacggcacctatgaagccaacatgaccatgcaccactcggacgtgatttttgccgtcggcgttcgctttgacgaccggaccaccaataacctggccaagtattgtccgaacgcgacggtactgcatattgatatcgatccgacttcaatctcgaaaaccgtgccggcagatgtgccgatcgtcggcgatgcccggctggtgctggagcagatgctggagctgctggagcaggaggaagcgcagcagccgctggacgacattcgcgactggtggcaacagatcgagcagtggcgtgcccgtcattgtctgcgctacgacgaccagagcgataaaatcaaaccgcaggcggtaattgaaactatctggcggctgacccagggcgatgcctacgtcacttccgatgtgggtcagcatcagatgttcgccgccctgtattaccccttcgataaaccgcggcgctggattaactccggtggtctcggcaccatgggctttggcctaccggctgcgctgggggtcaaaatggctctgccggacgaaatggtggtctgcgtgaccggtgacggcagtatccagatgaacattcaggaactctccactgcgctgcagtatgagctgccggtcctggtgcttaacctcaacaaccgctatctcgggatggtgaagcagtggcaggatatgctctattccgggcgtcactcgcagtcctatatggaatcgctaccggactttgtccgtctggcggaagcctatggccacgtcgggatccgcatcagcgagccgcaggagctggagacgaagcttgctgaagctctggagcaggtgcgccagcgtcggctggtgtttgtcgatgtgaccgtcgacggcagtgagcatgtgtaccccatgcagatccgcggcggcggcatggatgaaatgtggttgagcaaaacggagaggacctgattatgcgccggatattatcggtattactggaaaacgaatcgggtgcactgtcccgcgttatcggcctcttctcccagcgtggctataatatagaaagcctgactgtcgcgccgacggacgatcccactctctccagaatgaccattcagaccgtgggcgatgaaaaagcgattgagcagattgaaaagcaactgcacaagctggtggatgtcctgcgggtcagcgagctggggcagggggctcatgttgaacgcgaaattatgctggtgaaggttcaggccagcggctatggccgtgaagaagtgaagcgcaacaccgaaatcttccgcggacagattatcgacgtgacgccttctatctataccgtccagctcgccggcaccagcgataagctggatgcatttctggcctcgctgcgcgatgtcgctcggattgtggaagtggctcgctccggcgtggtcggcctgtctcgcggtgataaaatcatgcgctaaggatcgggaactgctgtaaaaatagcccggcagagactgtcgggctttttttttgcgaaatcagtaggaactgtaagcgaaagcggttgctgcgctaactattctgcgcttagatgttataaaaaggattccatacctgaataatggttatgtttggcacttcttacccaaggggcaattgtgaaactggatgaaatcgcccggctggccggtgtttcaagaaccaccgcgagctatgtgattaatggcaaagcgaagcagtaccgcgtaagcgataaaacggtcgaaaaagtgatggctgtggtgcgagagcacaactatcacccaaatgcggtcgctgctggcctgcgtgcaggacgcacacgctctatcggtctggtgatcccggatctggaaaacaccagctatacccggattgcaaattatctcgaacgtcaggcgcgtcagcgcggctatcagctgctgattgcctgctcggaggatcagcccgataacgagatgcgctgcattgagcatctgctgcagcgccaggtggacgctatcattgtctctacttcgctgccgccggagcatccattttatcagcgctgggctaacgacccgtttccgattgtcgccctcgaccgcgccctcgatcgcgagcacttcaccagcgtggttggcgctgaccaggatgacgccgagatgctcgcagctgagctgcggacgtttcctggcgaaacggtgctctatctcggcgcgctgccggagctgtcggtgagcttcctgcgtgaacagggcttccgtaaagcctggcaggacgatccgcgtgaggtgcattatctctatgccaacagctatgagcgcgaagcggcggcccagctgtttgagaaatggcttgaaacccatccgatgccacaggcgctgtttaccacctctttcccgctgctgcagggcgtaatggatgtgaccttgcgtcgcgagggtaaactgccctccgagctggcgatcgccaccttcggtgataatgagctgctcgattttctgcagtgtccggtactggccgtggcccagcgtcatcgcgatgtcgctgaacgggtgctggagatcgtcctcgccagcctcgacgaacctcgcaagccgaagccgggtcttagccgcattcgccgtaatctctatcgtcgcggtagcctgaatcgccgctaagggcgccatatcgccagcgcccaggtataaacctggcaggcctgaccgtaagcaggccgctggcgataaatcaggcaattgacgtgcaaaatgcaaaactgaatatatttcagacaaatccctaaacttctttacgcgttattttattttattcactgaccatcgttttgtgactccaaatggggtacaaaaaatgactgcgcggactttaattgtattattttgttacattcatcaggttaattgctgaattaacactcattttgtacgcgccacgctttcttccccgtcatatcccgcgcctggccagtccctctgccagcaacaggtactgttaacggccggcataatggcctaaaatgccgctcgcgtcgcaaactgacactttatattttcccgccgaagatattctgttgtttataactgttacgagtttgttggttattttcttacacgtattcataacgttaatttgcctcgcctgttgatgattttttcatcagggctaatgtcggctgtaaataatgggtttttgagctccgttggcatccgtgctggcttgacaagcttttcctccgctccgtaaactccttctggtgggaatttgtggggtaaagtggcgaaaaggggtgaggctggcatgttccgtggagcaacgttagtcaatctcgacagcaaaggccgcctggccgtgccaacgcgctatcgcgaagggctgatcgagaacgctgccggtcaattggtatgcaccattgacattcatcacccgtgcctgctgctttatccattgcctgaatgggaagtcatcgagcagaaattgtcgcgtttatcgagcatgaatcccgttgagcggcgcgtacagcgtttgcttttgggtcatgccagcgaatgtcagatggataatgccggccgcttgctgattgcgccggtgttacggcagcatgccgggctgacaaaagaagtgatgctggtcgggcagtttaataaatttgaactgtgggatgaaacgacctggtatcaacgggtcaaggaagatatcgacgctgagcagtccgcgaccggtgaactgtcggagcgcctgcaggatttgtccttataaaaatgatggaaaattataaacatactacggtacttctggatgaagccgtcaacggcctcaatattcgtccagacggtatctatattgatggtacttttggccgcggcggtcactcgcgcctgatcctctcccggctgggtgcggaaggacgcttgctggccatcgatcgcgacccgcaggcgattgccgtcgcgcaaaccatcgatgaccctcgcttttccatcgtacatggtcccttttcacaactcgctgagtacgtcggcgagcgcaatcttaccggtaagatcgacggcattctgctcgatctcggcgtctcttccccgcagcttgacgatgcggaacgcggcttttcctttatgcgtgacgggccgctggatatgcgcatggatccgacgcgcggtcagtccgcggccgaatggctgcagacggctgaagaagacgatatcgcctgggtgattaaaacctttggcgaagagcgtttcggcaaacgtatcgcccgcgcgatcgtcgaacgtaatcgcattcagccgatgacccgcaccaaagagctggcggaagtcatcgccgcggcgatgccggtaaaagataagcataaacatcccgcgacccgtaccttccaggcggtgcgcatatgggtaaacagtgaactggaggagatagagcaggcgctaaaaagctcgctcagcgtgctggccccgggcgggcggctgtcgatcattagttttcattcgctggaagatcgcattgtgaagcgctttatgcgtgagcaaagccgcggtccgcaggttccggcgggaataccgatgaccgaagcgcagctcaaaaaactgggcggccgtgagttgcgagcactaggcaagttgatgccgggcgaagaagaggtggcagagaatccacgcgcccgtagttcagtgctgcgtatcgcagagaggacgaacgcatgatcggcagagtgacagaggccttaagcaaggttaaagggtcgattggaagcaacgagcgccatgctttgcctggcgtgatcggggacgaccttctgcggtttgggaaactgccactctgcttgttcatttgcatcattattacggcgattaccgtggtcaccactgcgcatcacacgcgcctgttgaccgcgcagcgtgaacagctggttctggagcgcgacgccctggatattgagtggcgcaacctgatcctcgaagagaacgcgctcggcgatcacagtcgggttgagcggatcgcgaccgagaagttacagatgcaacacgtcgatccatcacaagaaaatatcgttgtacagaaataaggattattgcgacggatgaaagcagcgccaaaaacgcctaaagcaaaacgtcaggaagaacaggccaactttatcagttggcgttttgcgttgctgtgcggctgtattctgctggcgctggcttttctgctgggtcgcgtcgcctggttacaggtgatcagccccgatatgctggtgcgccagggcgatatgcgttctctgcgcgtacaggaagtgtccaccgcgcgcgggatgattaccgatcgctccggacgtccgctggcggtcagcgtgccggtgaaggctatctgggccgacccgaaagagctccatgacgccggtggggttaccctggatacgcgctggaaagcgctggcggatgccctcaatatgccgctggatcagctggcgacgcgcatcaataccaatccgcggatgcggtttatctatctggcgcgtcaggttaatcctgacatggccgattacatcaagaagctgaagctgccgggcattcatctgcgcgaagaatcccgtcgttactacccttccggggaagtaaccgctcacctcatcggctttaccaacgtcgatagccaggggattgaaggggttgagaaaagctttgataaatggcttaccggtcagccgggcgagcgtatcgtacgtaaagaccgctatggccgggtaattgaagacatctcttctaccgatagccaggcagcgcacaacctggcgctgagtatcgacgaacgcctgcaggcgctggtctatcgcgagctgaacaacgccgtggcctttaacaaagccgagtcgggcagcgccgtgttagtggatgttaacaccggtgaagtgctggcgatggccaacagcccatcctataacccgaacaacttcgccggtacggcaaaagacaccatgcgtaaccgtgcgattaccgacgtgtttgaaccgggttcgacggtgaaaccgatggtggtcatgacggcgctgcagcgcggtatcgtcaacgaaaataccgtgctcaataccgtgccttatcgaattaacggccacgaaatcaaagacgtggcgcgctacagcgaattgaccctgaccggggtgctacagaagtcgagtaacgtcggtgtttctaagctggcgttagcgatgccgtcctcagcgttagtagatacttactcacgttttgggcttggaaaggcgaccaatttggggttggtcggagaacgcagtggcttatatcctcaaaaacaacggtggtctgacatagagagggccaccttttctttcggctatgggctaatggtaaccccgttacagttagcgcgagtctacgcaacgattggcagctatggcatctatcgcccgttgtcgattaccaaggttgatcctccggttccgggcgagcgcgtcttcccggaatcactcgttcgtaccgtcgttcatatgatggaaagcgtggcgctgcccggcggcggcggtgtgaaagcggcgatcaaaggctatcgcatcgcgattaaaaccggtacggcgaaaaaagtggggccggatggccgctatatcaacaaatatattgcttacaccgcaggcgttgcgcccgccagccatccgcgcttcgcgctggtggtggtgatcaacgacccgcaggcaggtaaatactacggtggcgccgtttccgcgccggtcttcggtgccatcatgggcggcgtattgcgcaccatgaacatcgagccggatgcgctggcaacgggcgaaaaaagtgaatttgtaattaatcaaggcgagggaacaggtggcagatcgtaatttgcgcgacctactcgctccatgggtgccaaacgcaccggagcgcattctgcgagagatgacgctggacagccgggtggctgcttccggcgatctctttatcgcggtacagggtcatcaggcggacgggcgtcgttatatcccgcaggcgatagcgcaaggtgtggctgccattattgctgaagcgcagggcgaagctaaagacggtgagatccgtgaaatgcacggcgtgccggttatctacctgagccagcttaacgaacgcttatcggcgctggccgggcgtttttatcatcagccgtcgcagcagctgcgtctggtgggcgtcaccggcaccaacgggaaaaccaccaccactcagctgctggcgcagtgggcaaagctgctcggcgaaaccagcgcggtgatggggaccgtcggtaacggtctgctggataaagtcgttccaactgaaaacaccaccggttccgcggtggacgttcaacatgtgctctccagtctggtcgggcagggggctaccttcggcgcgatggaagtctcctcccacggtctggtacagcaccgcgtagcggccctgcagtttgccgcctcggtgtttaccaatctcagccgcgatcatctcgactaccatggcgacatggagcactacgaagcggcgaaatggctgctgtactccacccatcattgcggtcaggccatcgtcaatgctgacgatgaagtcggtcgtcgctggctggcgaagctgccggacgcggtggcggtatcgatggaagatcatatcaacccgaattgccacggccgctggctaaaggctactgcggtgaactatcacgacagcggggcgaccatccagtttgactccagctggggcaagggcgaaatcgaaagccgcctgatgggcgcctttaacgtcagcaatctgctgctggcgctggccacgctgctggcgctgggctatccgctggccgatctgctgaagagcgcagcgcgtttacagccggtgtgcggccgtatggaagtgttcagcgcgccgggtaaacctgccgtggtggtggattatgcccatacgcctgacgcgctggaaaaagcgctgcaggcggcacgcctgcactgcagcggcaagctgtggtgcgtcttcggctgcggcggcgaccgcgacaaaggtaaacgtccgttgatgggcgctatcgcggaagaatttgccgacatcgtggtcgttactgacgataacccgcgcaccgaagagccgcgggcgattatcaacgatattctggccggcatgctcgatgcaggtcaggcgaaggtgatggaaggccgcgcggaagcggtgaccaacgccgtgatgcaggcgaaagagaacgacgtggtgctggtggcgggtaaaggccatgaagattaccagatcgtcggcaaccgccgtctggattattccgaccgcgtgaccgtcgcgcgtctgctgggagcggtagcatgattcgctttacgttaagtcaacttgccgcgatcgcccatggcgaacggcagggtagcgatgtcgctatcgacgaggtgaccaccgatacccgtaaagtgacggcgggctgcctgtttgtggcgctgaaaggggagcgtttcgacgcccatgattttgccgaacaggcgaaagcggcgggcgccggcgcgctgctggtgagtcgtccgctggcctgcgatctcccgcaggtgattgtgaacgatacccggcaggctttcggtgagttagccgcctgggtgcgtcagcaggtgccgactcgcgtcgtcgccttgaccggctcgtccggtaaaacctcggttaaagagatgaccgcggcgatcctcagccagtgcggcaacacgctgtataccgccggcaacctgaacaacgatatcggcgtcccgatgacgctactgcggctgaccaaagagcatcagtacgcggtgatcgaactcggcgccaaccaccagggcgaaatcgcctggaccgtcagcctgacgcgtccggaagcggcgctggtcaacaaccttgctgcggcgcacctggaaggtttcggttcgctggcgggcgtggcgaaggcgaagggcgaaatctataccggtctgccggaaaatggcatcgccatcctcaatgccgacaataacgactggctgaactggcaggcggtgattggcgatcgcaaagtgtggcgcttctcgccgaacgcggcgaacagcgatttcacggcgaccaacgtgcagatcactagccacggcaccgaatttacgctgcagaccccaaccggcaacgttgacgtactgctgccgctgccgggacgccacaacatcgctaatgcgctggccgccacttcgctggcgatggcggtaggcgccgatttggcggcggtgaaagccggactggcgcagctgcaggccgttccgggacgtctgttcccgatccggctgaccgagagccagctgctgctggatgattcctataacgctaacgttggttcgatgaccgcggcggtgcaggtgctgtcagagatgcccggctttcgcacgatggtggtcggcgatatggcagagcttggcgcggagagcgcggcctgccatcgcgaagtcggcgaagcggcgaaagcggcgggtctggattgcgtcctcagcgtcggtgccttgagcgcggatatcagccgcgccagcggcgtgggcgaacattttaacgataaagccgccgtggtggctcgcctgcgcgagctgctggcggagcacaaaataatgaccattttagtgaagggttcacgtagtgccgccatggaagaggtagtacgcgcattacaggagactgggacatgttagtatggctggccgaacacttggtcaaatattattccggctttaacgtcttttcatatctgacgtttcgcgccatcgtcagcctgctgaccgcgctgttcatctcgttgtggatgggcccgcgcatgatcgcccgtctgcaaaaactcgcctttggccaggtcgtacgtaacgacggcccggagtctcatttcagtaaacgcggtactccgaccatgggcgggatcatgatcctcaccgcgatcaccgtttccgttctgctgtgggcctatccatctaacccgtacgtctggtgcgtactgacggtattaatcggctacggcatcatcggtttcgttgatgattaccgtaaagtcgtgcgcaaagataccaaaggcctgatcgcccgctggaagtatttctggatgtcggtgatcgccctgggcgtggccttcgcgctgtatctggcggggaaagataccccggcaaccgagctggtggtgccgttctttaaagacgtaatgccgcagctggggctgttctatatcttgctggcctacttcgttatcgtcggtaccggcaacgccgtcaacctgaccgacggcctcgacggcctggcgattatgccgaccgttttcgtcgcggcaggctttgcgctggtggcatgggccaccggcaacatgaattttgccaactacctgcatatcccgtatctgcgccacgctggcgagctggtgatcgtctgtacggcgattgtcggggcggggctgggcttcctgtggttcaacacctacccggcgcaagtctttatgggcgacgtcggttcactggcgctcggcggcgcgttgggcattatcgccgtgctgctgcgtcaggagttcctgctggtgatcatgggcggggttttcgtggtggaaacgctgtcggttattctgcaggtcggctcctttaagctgcgcggtcagcgcatcttccgcatggcgccgatccaccaccactatgaactgaaaggctggccggagccgcgcgttatcgtgcgcttctggattatttcgctgatgctggtgctgattggcctggcgacgctgaaggtacgttaatcatggcagattatcagggtaaaaaagtcgtcattattgggctgggtatgaccggcctgtcatgcgtggactttttcatggcgcgcggcgtaaccccgcgcgtgatggacacccgcgtcgcgcctccggggctggataaattacccgaatcggtcgaatgccatgtcggcggactcaatgatacctggctgctggcggcggacctgattgtcgccagtccggggattgcgctggcccatccttcgctcagcgcagcggccgacgctggcgtagagatcgttggcgatatcgaactgttctgccgcgaagcgcaggcgccgattatcgccattaccggttctaacggcaaaagcactgttactaccctggtgggcgagatggcgaaagccgctggagttaacgtcggcgtgggcggcaatatcggcctgccggcgctgatgctgctggacaccgatcgagagctgtatgtgctggagctctccagcttccagctggaaaccacctccagcctgcaggcggtggcggcaaccatcctcaacgtgactgaggaccatatggaccgctacccgctggggctgcagcagtatcgcgcggcgaagctgcggatttacgagaatgcgaagacctgcgtggtgaacgcggacgatgcgctcaccatgccggtacgcggggcggacgaacgctgcattagctttggcgtcgatgtcggtgactaccaccttaaccgccagcagggcgaaacctggctgcgcgttaaaggtgagaaagtcctcaatgtgaaagagatgcctctcaccggtcagcataactacagcaacgccctggcggcgctggcgctggccgatgccgcgggtctgccgcgggccagcagcctgaaggcgctgaccacctttaccggtctggcgcaccgtttccagctggtgctggatcacaacggcgtacgctggattaacgactcgaaggcgaccaacgtcggcagcaccgaggcggcgctgaacggcctgcagctggacggcacgctctatctgctgcttggcggcgacggcaagtccgctgatttcaccccgctgaagcgctacctcggcggcgatcgtattcgcctgtactgctttggtcgcgatggcgccgagctcgctgagctgcgtcctgaggtggcggtacaaactgagactatggaacaggcgatgcgtcagattgctcccctggtgaaagcgggggacatggtgctcctgtcgccggcctgcgccagcctggatcagtttaagaactttgaacaacggggcgagatgtttgcccgtctggcgaaggagttaggttgatgcgtttctctctcccacgcctgagaatgccgcagctgagcctgcctcggctgagactgccgcgactgccggggatgtttattttcgcctggctattcgctgcgctgaaaggctgggtgatgggctcgcgcccgaaagataacgacagtctggtgatgtatgaccggatgctgctatggctgaccttcggcctggcggcgatcggctttattatggtgacctcggcgtcgatgccggtcggacagcgcctggcgaacgatcctttcctcttcgccaagcgtgacggcctgtacattgtactggccttcgcgctggcgatgattacgctacgtctgccgatggatttctggcagcgccacagtaccgcgatgctgatcgcctcgatcgtcatgctgctgatcgtactggtagtaggcagctcggtaaacggcgcatcgcgctggatagcccttggtccgctgcgtattcagccggcggagttcaccaagctgtcgctgttctgctacatcgccaactatctggtgcgtaaagccgacgaagtgcgtaacaacctgcgcggcttcttaaaaccgatgggcgtgattttcgtactggccatcctgctgctggcgcagcctgacctcggtaccgtggtggtcctgttcgtcaccacgctggcgatgctgtttctcgccggcgcgaagctgtggcagttcatcgccattatcggcatgggtatttcggcggtggtcctgctgatcctcgccgaaccataccgtattcgccgcgtgacctccttctggaacccgtgggaagacccgttcggcagcggctaccagctgacccagtcgctgatggctttcggccgcggcgagatgtgggggcagggcctcggcaactcggtgcaaaaactggagtatttaccggaagcgcacactgactttatcttcgccattatcggcgaagaactcggttatatcggtgtggtactggcgcttttaatggtattcttcgtcgctttccgcgccatgtcgattggccgtaaagcgctggagatcgatcatcgcttttccggcttcctcgcctgtgcgattggtatctggtttagcttccaggcgttagttaacgtcggcgcggcggcggggatgctgccgacgaaaggtctgacgctgccgctgatcagttatggtggttccagtctgttgattatgtcgacggccattatgttgttgttgcgaattgattatgaaacgcgtctggaaaaagcccaggcgtttacacggggtgtgcgatgagcggtcaggaaaagcggttgatggtgatggcgggcggtaccggcgggcatgtgttcccgggactggcggtcgcgcaccatttaatggaccagggctggcaggttcgctggctgggtaccgccgatcgtatggaagcggatttagtgccgaaaaacggcatcgaaattgattttatccgcatctccggcctgcgtggcaaaggtatcaaagcgcagctactggcgccggtgcgtatctttaacgcctggcgtcaggcgcgggcgatcatgaagcgtttccagccggacgtggtgctgggcatgggcggctatgtttccgggcctggcggtctggcggcgtggtcgctggggatcccggtggtcctccacgagcaaaacggcattgccggcctgactaacaagtggctggcgaagattgcgaagaaagtgatgcaggcgtttcccggcgcgttcccgcatgcggacgtcgttgggaacccggtgcgcaccgatgtactggcgctgccgctgccaggtcagcgtctggttggccgtcagggaccgattcgcgtgctggtggtcggcggctctcagggcgcgcgcgtcctgaaccagacgatgccgcaggtggcggcgaagctcggcgctacggtgaccatctggcatcaaagcggcaaaggcggccagcaaaccgtgcagcaggcctatgccgccgccggacagccgcagcataaagtgacggaatttattgatgacatggccgcggcgtatgcctgggcagatgttgtggtttgccgttccggcgcgctgacggttagcgaaatcgcggccgcaggtttaccagcgctgtttgtcccgttccagcacaaagatcgtcagcagtactggaatgcgctgccgctggagaaagccggcgcggcgaaaattcttgaacagcctgagttcacggtagaggcggttgcctctaccctggcgagctgggatcgggaaaccttgctggatatggcggaacgagcgcgtggcgcttcgattccggacgctaccgagcgggtagcagaagaggtcagcgccgtagctttggcgcgctaattgcggtgattttcaccgcccgaatacagaagttgatggcgtaaagaatgaatacacaagatttggcaaaactgcgttccatagtgcccgagatgcgtcgcgttcggcacattcactttgtcggcatcggcggtgccggtatgggcggtattgccgaagtgttggctaacgaaggttaccagatcagcggctccgacctggcgccgaatccggtgacccagcagctgtcgcagcttggcgccaccatttatttcaaccatcgcccggaaaacgtgcgtgatgccagcgtggttgtcgtttccagcgcgatttcggcagataacccggaaatcgttgccgcgcatgaggcgcgtatcccggtgatccgtcgtgccgaaatgctggcggaacttatgcgctttcgccacgggatcgccattgccgggacccacggcaaaaccaccaccaccgcgatggtatccagcatttacgccgaggccgggctggacccgacctttgtcaacggcgggctggtaaaagcggcgggcgtacatgcccgccttggccatagccgttacctgatcgcggaagcggatgagagcgacgcgtcgtttctgcatctgcagccgatggtggccattgtcactaacatcgaagccgatcacatggatacctaccatggcgacttcgagaatctgaagcagacctttatcaacttcctgcacaacctgccgttctacggacgcgcggtgatgtgcgtggacgatccggtgatccgggaactgttgccgcgcgttggccggcagatcaccacctacggttttagcgacgacgccgacgtacgcgtcgaggactatcgtcaggttggggcgcaggggcatttccgcctggtgcgccaggataaagcgatcctgcaggtgacgctcaatgccccgggacgccataacgcgctgaacgcggcggcggccgtcgccgtggcgacggaagaggggattgacgatcgggctattctgcgcgcactggagagcttccagggaactggacgccgctttgattttcttggcgagtttccgctggccgaagtcaacggcaaaccgggcagcgcgatgctgatcgatgattacggtcaccacccgacggaagtggacgccaccattaaagcagcgcgcgccggctggccggataaaaacctggtgatggtattccagccgcaccgttatacccgtacccgcgatctgtatgatgattttgccaacgtgctgacccaggtggatgccctgctgatgctggacgtctatccggcgggcgaagcgccgatcccgggcgccgacagccgctcgctgtgccgcaccattcgcggtcgcgggaaagtggatccgatcctggtgcccgattcgacccaggccgcggagatgctggcgtcagtcctgaccggtaacgatttagtactggtgcagggcgccggtaacatcggtaaaatcgcccgccacctggctgaaatcaaactgatcccgcaaaaaacggaggaggagcgccatggctgataaaatcgcggtgcttttcggtggaacctccgctgaacgtgaagtgtcgctgaattcaggcgcggcggtgctggccgggctgcgtgaaggcggggtggacgcccatccggtcgacccgcgcgatgttgatattacccagctaaaaaagcagggctttaagaaagcgtttattgccctccacggccgcggcggggaagatggcactctgcaggggctgctggagttaatccagctgccttataccggcagcggcgtgatggcttcggcgatttcaatggataaactgcgcagcaagtggctgtggcagggcgccggattaccggtcgcgccgtgggtggcgctgacccgcgcccagtttaccgccgggctgtctactgacgtcgaacagcaaattgcggcgctgggtctgccggtcatcatcaagccgagccgtgaaggctccagcgtcgggatgtcgaaagtcagcgaaagttgtgatttagcgagtgcattggcgttggcttttcagcatgatgatgaagttttggtcgaaaaatggctcagtggaccggaatttaccgtcgccatagtcggtgaagaaattttaccgtcaatacgtatccaggccgcgggaaccttctatgattatgaggcgaagtatctctctgatgagacgcaatatttctgcccaggatttgaagatcccgcgcgtgagtcagctattcagaacctggtgcttaaagcctggaatgttctgggttgcaaaggctggggccgtattgacgtgatgctggacagcgatggccagttttatctgctggaagcgaatacttccccgggcatgaccagccatagccttgtgccaatggcggcgcgtcaggcaggaatgagcttctcccagcttgttgtacgaattctggacctggcggggtgatatgtcgcaggctgcgctgaatacgcggaaccatgaagaagaggcttcttcttcgcgtcggagtaatggaacgcggctggcagggatcgttttcctgctggcggtgctgtttaccgtgctggtcagcgggtggatggttcttggctggatggaagatgcgcagcgcttaccgctgtcgaagatggtggtgaccggcgagcgtcactatacgcgcaatgatgacatccgtcaggcgatcctggcgctgggttcgccgggtacctttatgactcaggatgtgaacatcatccagagccagattgaacgtctgccgtggattaagcaggcgagcgtccgaaagcagtggcccgatgaattgaagattcatctggttgaatatgtgccgattgcgcgctggaatgatcaacatatggttgatgcagaaggaaatgccttcagcgtgccggcggatcgcaccagcaaacagaatttaccgatgttatacggtcccgaaggcagcgagaacgaagtgctgcaggggtatcgtgacatggggcaggtgctggcaaaggataaattcacgttgaaagtggcggcgatgaccgcccgtcgctcctggcagttgacgcttaataatgacatcaagctcaaccttggccgtggcgataccatgaaacggcttcagcgctttatggaactctacccggttcttcagcagcaggcgcagaccgacggcaaacggattagctacgttgatttgcgttatgactcgggtgcggcagtgggctgggtacctgctcccgcagaggaaactaatcaacaacagaatcaggcacaggcagaacaacaatgatcaaggcgacggacagaaaactggtagttggactggagattggcaccgccaaggtggccgctttagtaggggaagttctgcccgacggcatgatcaatatcatcggcgtgggcagttgcccatcgcgtggtatggataaaggcggtgtgaacgacctcgagtcggtggtgaaatgcgtacagcgcgccatcgaccaggccgaactgatggcggattgccagatttcatcagtttatttggcactttcgggtaaacatataagctgtcagaatgaaatcgggatggtaccgatttcggaagaagaagtgacgcaggacgacgtcgagaacgtggtccacaccgcgaagtcggttcgcgttcgcgatgaacatcgtgtcctgcacgtgattccgcaggaatatgctatcgactaccaggaagggattaaaaacccggtagggctgtccggcgtgcgtatgcaggcgaaggtgcatctgatcacctgccataacgatatggcaaaaaacattgttaaagcagtggaacgttgtggtctgaaagttgaccaacttattttcgccgggttagcggccagttattcggtattaacagaagacgaacgtgagctgggcgtctgcgttgtggatatcggcggtggtacaatggatatcgccgtctacaccggcggcgcattgcgtcacaccaaagtgatcccgtatgccggcaacgtggtgaccagcgatatcgcctatgccttcggtacgccgccgagcgatgccgaagcgattaaggttcgtcacggatgcgcattgggttccatcgtcggtaaagacgaaaacgtcgaagtaccgagcgtcggtggacgtcctccgcgtagcctgcagcgtcagacgttggcagaggtgattgaaccgcgctataccgagctgcttaacctggtcaatgaagagatcctgcagctgcaggaacagctccgccagcagggtgttaaacatcatctggcggcggggattgtgttaaccggcggcgcggcgcaaattgaaggtctggcggcctgtgcgcagcgcgtgttccatactcaggtgcgcattggcgcgccgctgaacatcaccggtttaaccgactatgcccaggagccgtattattcaacggcggtggggctgctgcactacggaaaagagtcacatctcagtggtgaagcggaagtagaaaaacgcgtgacggcctcagtgggctcgtggattaagcgactcaacagctggctgcgaaaagagttttaattttttaagagaacgcagacaattagcgttctcaggcgacaggcacaagacggagagaaactatgtttgaacctatggaactgaccaacgacgcggtgattaaagtcatcggcgtcggtggcggcggcggtaacgccgttgaacacatggtgcgcgagcgcattgagggtgttgaattcttcgcggtaaacaccgatgcgcaggcgctgcgtaagacggcggttggccagactatccagatcggtagcggtattaccaaaggtctgggcgcgggcgcgaacccggaagtcggccgtaacgcggctgatgaagaccgtgaagcgctgcgcgcagcccttgatggcgcagacatggtgttcatcgcggcaggcatgggcggcggtaccggtaccggcgcggcgcccgtagtcgcggaagtggcgaaggatctggggatcctcaccgttgcggtggtcactaagccgtttaattttgaaggtaagaagcgcatggcgttcgctgagcaggggatcaccgagctgtccaagcacgttgactcactgatcaccatcccgaacgacaagctgctgaaggtcctgggtcgtggaatttccctgctcgacgcattcggcgcggcaaacgacgtcctgaaaggcgcggtgcagggtatcgccgaactgatcacccgtccgggtctgatgaacgtcgacttcgcggacgtccgtaccgtgatgtctgaaatgggctacgcgatgatgggctccggggtggcgagcggtgaagaccgtgcggaagaagcggctgaaatggctatctcttctccgctgctggaagatatcgacctgtcaggcgcgcgcggcgtgctggtcaacattactgcgggcttcgacctgcgtctggacgagttcgaaactgtgggtaacaccatccgtgcttttgcctcggataatgcgaccgtggttatcggtacctctctggacccggatatgaacgacgagctgcgcgtgaccgtagtggcgaccggtattggcatggataagcgtccggaaatcaccctggtaaccaacaagcaggttcagcagccggtgatggatcgttaccagcagcatggtatgtcgccgctgacgcaagagcagaagccggcagccaaagtggtgaacgacaatacgccgcaaaccgcgaaagagccggattatctggatatcccagccttcctgcgtaagcaagccgattaagaatcgactggaagttgggcatctgcgctctttgtgctaaactggtctcccgatagtggtgtacacttcggttggataggtaaattggcgagattatacgatgatcaaacaaaggactcttaaacgtatcgttcaggcgactggcgtcggtttgcataccggcaagaaagtcacactgacgttacgccctgcgccggcaaataccggggtcatctatcgtcgcaccgacttgaatccaccggtagattttccggctgatgccaaatctgtgcgtgataccatgctctgtacttgcctggttaatgagcatgacgtgcggatttctacggttgaacacctgaacgccgcattggctggcctgggtatcgacaacattattgttgaagtcgatgcgccggaaatcccgattatggacggcagtgcggctccgttcgtttatctgttgctggacgccggcattgatgaactgaactgcgccaagaaatttgtacgtatcaaagagacggttcgcgtcgaagatggcgacaaatgggctgaattcaaaccgtacaatggtttttcgctggacttcaccatcgattttaaccatccagcgattgatgccagcacccagcgctataccctgaacttctcggccgatgcgttcatgcgtcagattagccgtgcgcgtaccttcggttttatgcgcgatatcgaatatctgcagtcccgcggcctgtgcctgggcggcagcttcgattgtgccatcgttgttgacgattatcgcgtactgaacgaagacggtctgcgctttgaagacgaatttgttcgccacaaaatgctggatgcgatcggtgacctgtttatgtgtggtcacaacattatcggcgcattcacggcgtacaaatcgggtcacgcgttgaacaacaaactgctgcaggcggttctggcaaaacaggaagcctgggagtatgtgaccttcgaagacgacgcaaaactgccaatggcgttccgcgcaccgtcgatggttctggcgtaagcctgaccattcagtaaattcgactggtaacctggtactctctccgaccagggagccagtcgtttttcttttatagcaccctccagttattttcgctgcgatccctggataataattagcgtgcgttcgctgctttattaagcgttttcgccgggcaatcgccttcattcatgctgcctcaggccggtattaatgttagtatttgagcgcaaaattatttctcagggttgctttaccccgtggacatcaggttgtcctgcgaaaaacatcaataaagagacagcctgaacgacgacgggtctagcaaagaaaggtaatgaacgtgagtggattgctgacgcgctggcgacagtttggcagacggtatttttggccgcatctcctgttggggatggtcgcggccagcctcggcctgcctgcgctaagcaacggtcacgagaccgcggcgccagcgaaggcgaccgccagcaatcacaatccgagcaaggttaatttctctcagctggcgctgctggagacgaatcgccggcccagctttaccgtcgactactggcatcaacacgccattcgcaccgttattcgtcatctctccttcgccatggcgccgcaggcgctgccggtggcggaagaaacttccccgctgcaggctcagcatctggcgctgctcgacaccctcagcgcgctgctgacgcaggacagcacgccgccggtggtgatccgccaggcgggttacatcccttcttcatattctgccttccgcgtcagcgcctggataagccaggtggcggggatccgcgcagggcctcaacgtctcagctgaaaataaccacggaccatcctattttttgtgactccgcaccgcggggcgtttgagattttattatgcttatcaaaatgttaaccaaggttttcggcagccgtaacgaccgtacgctgcgtcgtatgcgcaaagtcgtcaatatcatcaacggcatggaaccggcgatggaaaaactctctgatgacgagctgaaagcgaaaaccgctgaattccgcgcgcgcctggaaaaaggcgaaacgctggaaagcctgatccctgaagctttcgccgtcgttcgcgaagccagtaagcgcgtattcggcatgcgccacttcgacgtccagctgctgggcggtatggtgcttaacgatcgctgcatcgccgagatgcgtaccggtgaaggtaaaaccctgaccgcgaccctgccggcgtacctcaacgcgctaaccggcaaaggcgttcacgtagtgaccgtcaacgactatctggcccagcgtgacgccgaaaataaccgcccgctgtttgaattcctgggcatgacagttggcatcaacatgtccggcctgccggcgccggcgaagcgtgaagcttacgctgccgatatcacctatggcaccaacaacgaatacggcttcgactacctgcgcgacaacatggccttcagcccggaagagcgcgttcagcgtaaattgcactatgcgctggtggatgaggtggattccatcctgatcgatgaggcgcgtacgccgctgatcatttccggcccggcggaagacagctctgaaatgtaccgcaaggtaaacaaaatcatcccgcatctgatccgccaggaaaaagaggattcggatactttcactggcgaaggccacttctcggtggatgaaaaagcgcgtcaggttaacctgaccgaacgtggtctggtgctgattgaagagctgctggtacaggaaggcattatggatgaaggtgagtccctgtactctccaaccaacattatgctgatgcaccacgttaccgccgcgctgcgcgcccatgcgctgttcacccgcgacgttgactacattgtcaaagatggcgaagttatcatcgtcgatgagcacactggccgtacgatgcagggccgccgctggtccgatggtctgcaccaggccgttgaggccaaagagggcgtggagatccaaaacgagaaccagactctggcctctatcaccttccagaactacttccgtctgtacgagaagctggcggggatgaccggtacagccgataccgaagcctttgaattcagctctatctataagctggataccgtggttgtaccgaccaaccgtccgatgatccgtaaagacatggcggatctggtctatatgaccgaagcggaaaaaattcaggcaattatcgaagatatcaaaactcgtaccgctgccggtcagccggtgctggtggggactatctcgatcgaaaaatctgaagtggtttcccgcgaactgactaaagccggcatcaagcacaacgtcctgaacgccaaattccacgccagcgaggcggatatcgtcgcccaggcgggctacccttccgcggtgaccatcgccaccaacatggcgggtcgtggtaccgatattatgctcggcggtagctggcaggcggaagtcgctgcgctggaaaacccaacgccagagcagattgagaaaatcaaagccgactggcaggtacgccacgatgcggtactggccgcaggcggtctgcacatcatcggtaccgagcgtcatgaatctcgccgtatcgataaccagctgcgcggccgtgctggtcgtcaaggggatgcaggttcttcccgcttctacctgtcaatggaagatgccctgatgcgtatcttcgcctccgatcgcgtgtctggcatgatgcgtaaactgggaatgaaacctggtgaggcgattgagcacccgtgggtcaccaaggcgatcgccaacgcccagcgtaaagtggaaagccgtaacttcgatatccgtaagcagctgctggaatatgatgatgtggccaacgaccagcgccgggcgatctacacccagcgtaacgagctgctggacgtgtctgacgtcagcgaaaccatcaacagcatccgcgaagacgtctttaaggcgacgatcgatgcccatattccgccgcagtcgctggaggagatgtgggatatcgaaggtctgcaggagcgtctgaaaaacgacttcgacctcgacctaccaatcaaagagtggctggataaagagccggagctgcatgaagagaccctgcgcgaacgtattctgcagagcgcggtagaaacctaccagcgtaaagaagaagtggtcggcgccgagatgatgcgccacttcgagaaaggcgtgatgctgcagactctggattcgctgtggaaagagcacctggcggcgatggattacctgcgccagggtatccacctgcgcggctatgcgcagaaagatccgaagcaggagtacaagcgcgaatcgttctcaatgtttgccgcgatgctggagtcactgaagtatgaagtgatcagcaccctgagcaaagtccaggtgcggatgccggaagaagtcgaggcgatggaacagcagcgtcgtgaagaggccgagcgcctggcgcagatgcagcagctcagccatcagagcgatgatgaagccgcagcccaggatctggcggcgcaaaccggcgaacgtaaagtgggccgtaacgatccgtgcccgtgcggctccggcaaaaagtacaaacagtgccacggccgtctgagctaaggtctgataaaacaaacaaaggcgcagagttctgcgccttttttatggagcgcattcaatgaaaaaactgcaaatcgccgtcgggataattcgcaatccgcaaggcgaaatctttattacccagcgcgccgccgatgcccatatggcgaataagctggagttcccgggcgggaagattgaatctgatgagacgcctgagcaggcgctaatccgcgaactgcaggaggaggttgggattacggtcaccacctcttcgctctttgataagctggagtatcagttccccgatcgccatattacgctgtggtttttcctcgtggaaagttggcaaggcgagccgtggggtaaagaagggcagccgggtcggtggatggcgggaccaacgttggatccggcggcgtttcctccggcgaatgaaccggttatcagcaaacttatcgcccagggctgagccccgggtcgcgaggctaacccgccaggcgccgggttagcttgccatcaaatcagggttgctgctcgctccagtcatcgctatcggagagatcccccgcgctggggatgcgcttctcttccgcagcccattctcccagatcgatcagttggcagcgcttgctacagaacggacgaaacggactctgctcgccccacaccacagttttgccgcaggtcgggcagttgacgatagtctcttctgacatgttatctccttaacagcaggccagttcaaaatcaaagcgctccggcacgatcccatattcactgtccagcgccaggaaacggatggcgaaacggctcttatggccggaaatttgcggataaagctggtgagccagatcgagacgcaggcgcagcagatcggcatcttcgccattatcctgataaaagccgttgaggctggtctgtttgcggaacagcgcggagttgcggataagatcgaggatcaggctcagggactggaccagcggatcgaggctggcaagccagctggccacctgctcgtcgcgatgcgcctgtggcatatggagccagatatgcagggtcggtaaatcgaagctgcagcagccgccaggaatactcaggcgctgacgcaccagcgcaatcaggcgatcttcacgcagaaactgaccaatgcgcggcgcggccatcagggtgctggaggactgcttcaactggtggcgcagctcgtttatgcgctcctgatcgacgcccggcacttctgcccatgactggagcttacgctgctggcgttccagctctttaaccaggtcagtgcgcacctcgccgcgctccaggacatccagcagatcgccggcgttacggaaaaaatggagcgcatcggcatggctggcaatctgcggatggaaagccatctgctggatcagaaattcgatgcgcagccaggtgcgcattttctcattaagaggatgttcaaacagaacgggggtatgcattacgagttttcctgtgaggcggcctgcgatgccagcgttaaatacttttcgtgcaggcgggcaacatccgatgccactgcatccggcgtgccagtgttttcaataacatcgtccgcgacggccaggcgctgctggcgcgtggcctgggcggcaagaatatgttcagcatgttcgcggctgaccttatcgcgcagcatggtgcgttcgatttgcgtctctttcggcacatcgacgaccagtacgcgatcggcctggccggacaggcggttttcgaccagcaaaggtacgacccagaggagataaggggaggtggcggcctgcatctggcggcgcgtttcctgctgaatcagcgggtgcaacagcgcattgagccaggctttttcctccacgtgagcaaaaattttttcccgcagcaggcggcggttcagcgtgccgtcgggggcaatcatctgtggtccaaagtggccgacaatggcctggagcgccggggtaccgggctcgaccacctgacgggcgataacatcggcatcgataaccttaaccccaagctgcgcgaaggcgtcggcgaccgtacttttaccgctgccgatcccgcctgttaacgcgactgtgtaccccatatcttctgaccctgaaacggattgctcgtattttttgcaggcagacagcgatgactggcagcgcgccggggaggcgacagtgagcatgtcgtgagggccccgcgccaaccgggatcgccgtccgctatactgtttgttttaatcaagcaaatcaaatggttaaaaacaatactccggcaggggaaggcataggcgcctttttctccattcaccaggtaaatttatacgattgtagcgtaaaaaaagtgaaaatcgcagtcttgcgcgggcctgattcgcgcgtatgataacgtcactggagttgtgctctcacattcatgccattaaccccaggaattcgcacatgcgtattgaagaagatctgaagcttggtttcaaagacgttcttatccgcccgaaacgctctaccctcaaaagccgttctgatgttgagctggaacgtgaattcacctttaaacattcaggcctgacctggtccggcgtgccgattattgcggctaacatggataccgtcggcaccttcagcatggctaaagcgctggccacttttggtattctgaccgcggtacataagcactacaccgctgaagaatggctggcgtttacccagggcgcatccgcagacgtactcaagcatgtgatggtttccaccggcacgtccgatgcggatttcgaaaaaacccagcagatcctctctcagaacccacagctgaattttgtgtgtatcgacgtcgccaacggctactccgagcactttgtacagttcgtggcgaaggcgcgcgaagcctggccgcaaaaaactatcatcgccgggaacgtggtcaccggtgaaatgtgcgaagagctgatcctctccggcgccgatatcgtcaaagttggcatcggcccgggatccgtctgcaccacccgcgttaagaccggggtcggctatccgcagctctccgccgtgattgagtgtgccgatgcggcgcacggccttggcggccagatcatcagcgacggcggttgcaccatgccgggcgatgtggcgaaagccttcggcggcggcgctgatttcgtgatgcttggcggcatgctggcgggccatgaagagagcggcggaaccatcgttgaagaaaacggagagaaattcatgctgttctacggcatgagctccgagtcggcgatgacccgccatgtgggcggtgtcgcgaaataccgcgcggcggaaggcaaaaccgttaagctgcctttgcgtggaccggtggagaataccgcacgtgatattctcggcggcctgcgttctgcctgcacctacgttggcgcctcgcgtctgaaagagctgaccaagcgtacgacctttatccgcgttcaggaacaagagaaccgggtattcaatagcctgtaatcggctgcactggcgcctgcgcggcgccagtgtttctcatcctcccaccccgccaatggcatcgcccaggtgaaaaacgggcaaatacattgccaccaccagaatcccgaccagcgagccggttatcaccagcatcatgggttcaagatgcgcagccagactatcggctcgctgataggtttgctggcgatggtgatgcgccaggttttccagcatctgatccagcgctcccgcgctttcccccgtgcggatgagctgcaggcacagcggtgtaaaaccgccgcagcggcttaacgcctgccaaatcggctccccctgaacgatcagcgcgcgggcctgcgccagacgctggcgccatagcgggcacgacagggactcttcaacgctttgcagcccctgcagaaagctaataccggcgctttgggttaacgccaggatggtgaagatcaggctcagctgttgtccgccgatcagggagccaatgagagggagcgcgttaagcaaccgctggcggcgcagcaaccagtcgctgcgccgccggatcagctggttgagcagcagcgggctcagcagcgaggccagcagcagcggccagccgcgacttagcatgtcgcctgccgcaacgaccatccgcgtcaatagcggtagcggcgtactgaacgtctggtagatggcggtgaactcgggcaggacaaaatagagcatccccagcaccaccaacagcgccagagagagcacgatcagcgggtagcgcagcgcttttttgactttgctggcgagccgctgctgctcctgctgctgattcgccaactgcaggcagcagatatcgagcttgcccgtcagttcgccggtgctaatcatcgccagatataggggcggaaaagcctggggccactgcgccagcgcggcagagaacgccactccctgggccagctcgcggcctagcgcctcaagcagcgcctgccactgggcatgcgactgctgctgcgccagcagcgataacccttccgccagcggcaggccggcctgcagcagggtcgccagctggcggatcgtttcgcaactgtagcgcgggtgccagaggctctgcttcaccgcacagcggcgtacggccagcggtatgactcgctgctgttggaggtgctgcaggacctccagacgcttggtttgccatagcatcccctgacagggggcgccctgcacatcaataccgcgccagcgccagagacgcttagtcgccatgggggatccccagcacccgcaccacctcttcgaggctggtcaatccctgttcgatagcctgacagccgctttcaaaaagcgtcatcatccccgcggctcgcgccagagattcaatctcaatggcgttaagtccctggactatcccctggcgtagcccgggggtaacaggcagcacttcgaacagcgccagccggccgtaatatccgtggtaacaatgttcgcagcccgctgcctgccagcgtggcagcgggcggggccacaggctgtgcggcaggtcggcggcgctgccggcattacgccgacagtggggacacagcttgcggaccagacgctgggcgatgaccagcgagagcgcagaggaaatcatccagcgggcgatgcccatttgctgcaggcgggtcagggtttcgctggtggaattggtgtgcagggtggagagcaccagatgaccggtctgggcggctttgagcgcgatttcagcggtctcggcatcgcggatctcgcccaccatgacaatatccggatcctggcgtaacagggcgcgcagcacactgtgaaaagtgagtccggcgcggggattgatttgcgtctggttcatcccggcgatggggatctccagtggatcctccacgctacagatattcacttgctcacggtttctggcctgcagggcgctgtagagggtcaccgttttcccgcttccggttgggccggtgaccagcagcagaccctgcggctggttcagcgcctggcgaaaggccgccagctgggaggatgagagtccgagtgcttccagatccagcgcctggtcaacctgatgcagaaggcgcaggacaatcttttcgccatagcggcagggcagagtggcgatgcgaaaagagagcggtcgtcccgcaagattcagcgcgaactggccatcctgcggtaaacggtgctcggcgatatcgagactggccaggaccttgagtcgcgcgataaccggtgcggccagttcgggagccagcaacggtagggcgtgaaggacgccatcgacccgcaggcggatgcgtaagtgcgtttccgtgggctcgatatgaatatcagacgcccgctgacgcagggcctgttcgaggatctggttgacccgttcggcgatattttccggcccgtcgttctgcgccagttgcgcctgcttttcctgggcctgcagacgcttatccatctgctcctggctccagcattcaatgtcgatccgcttttgcgtcgcgaagcgtagcgcctccattaactccgccggcggggtattaaccaccgcaatagagattgtctgttcatcgctatgcagcagcatggcgtggtagcgacggcagagagggatcagctgttctgttttcatgcattcgccctcacttcacccggaaaacgtcttcgcaggcctgctgaagcgcgctattgccggtgatggtgcagacgcgctgccagccggtgacgccctcggcattgtcccaggtcggcgtcagggtgacccccagtccgttcagactctcctgaccggtgagggtgacgacccctttggccacgctcatggcggagaggtagcgcgtggttgtcggcgagggaatgccgttgctgccgccgtcgcatggcgttaggccgccatgatcgagcgcgcaaagttcgatggctgtccggtaagggacaaaggtctgcagcaggtcggtgagggcggctttacgcaggtagttctggtaggccgggatgccgatggcgctaagaatggcgatgattccgataaccaccatcagttcaatcagggtaaaacctcgttgtttatccataagtcgctccttgttgtgacaggagcactgtgaagggattgaggggcgcaggcgagggggcgaaaacgatccgggaaagcgggttccagggtttttatctggatttcatggtgagcacgggcgactgcgaggcgggccgcaaattcaggccttcacgcccggaagcgtgaaggcctgttgctcagcggaagcgcatcgacaggtcgagcgcctgcacatgtttggtcagggcgccgacggaaatatagtcgacgccggtatcggcgaattcgcggatggtgtcaaaggtaacgttgccggagacctccagcgccgcctggcctgcggtaattttcaccgcctcgcgcatcaggtcggtggtgaagttatcgagcataatgatatcggccccggcttttaacgcctgctccagttcatccagggtttccacttccacttccaccggcacatcaggatgcagccagaacgccttttccactgcctgacggatcgatccggaggcgataatgtggttttctttaatcaggaacgcgtcgaacaggcccagtcgatggttggcgccgccgccgcagagtaccgcgtatttcagcgcggtacgcagccctggcagcgttttgcgcgtatccagcagttgggttttggtgccggcgagcaggtcgacatagcgacggacgacgctggcgacgccggagagggtttgcacaaagttcagcgccgtgcgttcgccggtgagcagaatacgcgacgggccttccaattcgaacagcggctggtcggctttgaccgcatcgccgtcggccacgtgccaggtgatattcacatcgtcaccggcgagctgaataaagacctcttccacccagcgtttgccacagaagacgccatcttcacgagtaatgaccaccgcatgggagcgtgcatcctgcggcaataattgcgcgctaatatcgttgttggcgtcgacttcgccgcccagatcttcccgcagggagtgtgcgacagcatcggtaatatcgagattaatacgttccagcagcacgtcacggcggcggtcggggttgtaacgacgaggcgacatgataaagctccagatagataagattcagaagtgggaaacatgctaacctgaacgacgtttcagtaccatacacacttcatcctttgggccggcgtgtggcccggaagcatgagttcgcgaaaggagatcccgcatgcagttgaacaaggggtggttggtcggcgcgcgtcgggttccctcgccgcaccatgactgccgtccggatgaagagaccccttccttactggtggtgcataacattagcctgccaccgggggaatttggtggtccgtggattgatgcgctgttcactggtaccctggatccgcacgcgcatcctttctttgccgagattgctcatctgcgcgtttcggcgcattgtctgattcgccgtgatggcgaaatcgtgcagtatgtgcctttcgataagcgggcgtggcatgcgggcgtctcctgttatcagggacgcgaacgctgcaatgacttttccatcggcatagagctggaaggcaccgatactctggcgtataccgacgcgcagtaccggcagctggcggcggtgacggatctgctgatcgcgctttatccggctatcgccgaaaacattgcgggccacagcgatatcgcgcccgtgcggaaaaccgatccaggaccggcctttgactggataaaataccgtgcgctgctcagcgccccgtcagaaaaggagacctcatgacgctgtttacgacgctgttggtgcttatcgccgaacggctgtttaagctgggcgaacactggcagcttgatcatcggctggaggtggcgtttcgccggataaaacatttctcgctaccgggcacgctgctgatgacgctggtggccgtcgcggtcgtgtatatcattcagcgtctgctgcaggggcagctgtttaacataccgctgctggtgttctggattttactgggcctgctatgcattggcgccggcaaagttcggctgcactaccatgcctatctgaaagcggcgtcgcgcaatgacagtcgcgcctgcgatgccatggccagcgaactgacgctgattcacggcgtgccgccgggctgtgatgagcgtgagtaccttagcgaactgcaaaatgcgctgctgtggattaactatcgatactatctggcgccgcttttctggtttgtcgtggggggcgcctggggcccgctgacgcttatcgcctacagcgtactgcgcgcctggcagacatggctggcgcgctaccagacgccgcaccaccggctgcagtccgggatcgatggtatcctgcatattgtggactggctgccggtgcgtctggtgggggtggtctatgccctggtgggccatggtgaaaaagcgctcccggcgtggtttgcttcgctgggcgaccgccattcgtcgcagtatcaggtgttgacccgcctggcgcagtattccctggcccgtgagccgcacgtggataaagtagcgacgccgaaggctgcggtatcgatggctaagaagacttcgctggtggtagtggtgattatggcgctgctgacgatttacggtaccctggtttaacggcctgagcccacgcgctgcctgccacgatgtacgtacctgcggggcttttgttgcctgatggcgctgcgcttatccggcctggcgagtcacccgcaggctcacgtcaagtagacccggcaagcaacagcgccgccgggcgatatatcagacgccgtgctggtcatgttgccgggtggcggcttcgcctgacccggcctggagaacccgcgccagcgggtaacattccgaaccgctacagcgtatccgccggtggaataccgaagtcgggcatcccgtcttcccgccagctgaccagctttaaccgcgtatggcgattgggatcatacagcgggtcgccttctatctcggtgtaattccgcgcgtgatacaccagcacatcttccccttccggcgtttgggtaaaactattatgacctgggccatactggcggttttcatagctggtgcggaacaccggctgcggagctttatgccagtttgccggctgcagcggatcggcctgccggtcgatccataacaaccccatgcagtagttttcatcggtggcgctggcggaatagctgataaatagcttatcgccatgcatcagtaccgcaggcccttcgttgaccttaaatccccggcactcccagtcgaactccggcttgctcagcatgaccggctcgccttttaacgtccacgggttagccatttcggcgagatacaggtttgagttgccttcgatatgcggggatttttgcgcccacagataccagcgtttcccctgatgggtaaaagtggtggcatcgagggcgaaggtatcgaaaggcgtgaccacctggcctttttcctgccagcggccggtcagcggatcgctgtcagcgcactcgagaacgaacatgcgatgctggaacatcccccgcgcatccagatcgtgagtatgggtggcggcaaaatagatataccacttaccgtctatttcatgcagctccggcgcccaaatcagttggctcatcggcccgctttgcggcgcgcgccaaaccacgaccggctcagcatcgcgtaatccttcaagggttaccgcgcgccggatctccagccggtcgtattccggcaccgaggcaataaagtagtagtggctaagatggcgcaggataaaggggtctgcacgctgttcaataaaggggtttggccagttgttcatcaggctttccttacgtgttcactggttttcagttcctggtattcgttcagctcgctgtagttgctgcggcgcttctccagatcgctctgaatctggcgcatcagggtacggtcaaccttcagcaggcgcaccacgccggcggtgatcagatagccgacgccgggaatgactgagaatagcagcacgataccgttcagcgcggaggcgctttgcgctttcgcgccggcgtcgtagccgtaccatgacagcaggaaaccgaccattgccccggcgaccgccaggccgaccttcaggaagaacagattaccggagaagctgataccggtgatgcgcttgccggttttccattcgccgtagtcatcaacgtcggacattagcgaccagtgtagcggggaagggatttgatgcagaatgttgagcaggaagtagagcaccataatcagcgtggtggcgtgtggattaaagaaatagaaggcgcaggagaacacggccagcacgatattggtccagaagaaaacctgcagtttgcaccagcggtcggtcaggactttcgccagcatgctgccaatcatcatcccaactacgccgaggctgataaacagggtggcaaaatgggtgctttgtcccatcacccaggtgacgtagtacatggtggcggccatgcggataaagcccggacagacgttgcacagcgtgagcagcaggatgcgcacccactggtcatttttccagacgtctttcagatcttttttcagttcgtcattcgtctgcaccgccgggcggatacgttcgcgcacggtggcgaagcagaacaggaacatacacataccgataaaggccagcacggtcatcgccatctggtagcccttcgctttatcggcgccgccgaaccagtcggccattggcagcagcgtcaatgacagcaggagcgtggcgatacccaccatgacgaaacgataagactggcaggcaacacgctctttcggatcggcggtcatcaccgttcccagcgagcagtagggaatattaatcgcggtataggtaatcgacagcagaaagtaggtcacaaacgcatagatgactttgctattgtaggtccactcaggagtggtgaacatcaggacgctgaacagggcgtaggggaaggcgatccacagcagccatggacgaaagcgaccatatttactacgggtgcggtcggcaagagcgcccatgatagggtcggttaccgcatcgatgactcgcaccgagagcagaagtacgccgaccagcgccggcgccagtccgaatatatcagtgtaaaaatagttcacaaacagcatgatggcgccaaagataatattgcatccggcatcacccatcccgtaaccaatcttttctcttattgaaagcgtgtactctgccatgtgcggtctctccgttgcagtatggagagaattattggctgcggttggcagaaatacgttgcaggaactcgttgacgatatggataaataagctatggaggggaaagtgtgaagcagataacaatgctctgcacccattattcaggggagggcgcagagcaaagtgaagtattgatgagatgtattattgtgcttttatggtggcggcggctttctctttaaacaggtagcccacgcccagcaccgcaatccataccgggatcagccagacggaaatcgccatccccggggtcatcagcataatcaccagcaccgccgccataaacagcaggcacagccagttgcccagcggatagaagagggccgggaaacgcgtgactacgccctgctgctttttggcgcgacggaatttcatatgcgcgaggctgatcatcgcccagttgatgaccagggccgagaccaccagcgccatcagcagaccgaaagcagattcaggcgccaggtagttgatcagcacgcacagcgcagtgaccagggccgagacgagaatggtattcaccggcacgccgcgtttgtcgacgctgagcagcgcttttggcgcgttgccctgctgagcaaggccgaacagcatacggctgttgcagtacacgcagctgttataaaccgacagcgctgccgtcagcaccaccacgttcagagcgtttgccaccagcgtatcgccaagttcatggaagatcaggacgaacggactggtgtccgcggtgacgcgggtccacggcagcagggagagcagcaccgccagcgaaccaacatagaagatcagaatacggtaaataacctgattggtggctttaggaatgctttgctccggattatccgcttccgcggcggtgatccccaccagctccaggccgccaaaggagaacatgatgatcgccatcatcatcaccagcccgtaaaagccgtgcggcaggaagcccccctggtcccacaggttacgtaccgtcgcctgcgggccgccgttgccgctgaacagcagccagccgccgaacaaaatcatcgccactacggcgaccactttgataatcgcgaaccagaattccatttcaccgaacactttgacattggtcaggttaatggcgttgatggcgatgaagaagaccgccgccgaggcccaagtagggatttccggccaccagaactggatatatttgccaacggcggtcagttccgccatggccaccaggacatacagtacccagtagttccagccggaggcgaagccggcaaaaccgccccagtatttgtaagcaaagtggctaaatgagccggccaccggctcttccaccaccatttcgcccagctgacgcatgatcaggaaagcgataaaaccggcgatagcgtaaccaagaatgatacccgggccggcggactgaatgacggacgcgctccccagaaacaggccggtgccgatagccccgcccagcgcgatgagctgaatgtgacggtttttcaggccgcgcttcagccgatcgccgtgctgttgaccttccatatgaaacctcgtgtgtggttattttttgtgtacgtcatccgtcaggttgctgcttcactgctgtccctgcctgaaagcatagccagcgaaaatttgggcgaagtggcccactttttacctgagtgatggcgcgcacatattgttgtgtttgtgtattcaggaacttccgtttctgtattgttttgtttacggaaggctgtgtggtaattccgaaaaaggcctttcgtctccggcagaatagtggtaagcgcgtttgaatgcacctgctttatgaagggatgatgacgatgtgtctaaaaagacatcaatagtcacaatctgtcgtattttgatgcatgctgctttgtcattatttattcactgtaaatgactctgtattcatttattgcagcgttgaatcggttcagaaagcgtaatttttcgtttctataaagttaaggctacctctttgtgagtaaacgtaacatttgtgcaaggttacatttctgaaatgttatttctgtaaggttgttaaaatgtcccgggtttactgatttcaatcaaaacctgtatggacagaaggtgaatactttgttactttagcgctacgaactttaaattggtaagaccaattgactccgggctaatggcagagacagggaatatggcctacagcaaaatccgccaaccaaaattatccgatgtgatagagcagcagctggagtttctgattcttgaggggaccttgcgccccggtgaaaaactcccgccagaacgcgaactggctaaacagttcgacgtttcccgcccctcgctgcgtgaggcgattcaacgcctcgaagccaagggcttgttgcttcgtcgtcagggaggtggaacgtttgttcagagccgcctgtggcagagcttcagcgatccgctggttgagctgctgtccgatcaccctgaatcccaattcgatctgcttgagacccgtcacgcgctggaaggcattgcggcctattacgcggcgctgcgcagcaatgatgaggatcgcgaccgtatccgtgagctgcatcaggctattgaacgcgctcagcagtcgggcgatttggacgctgagtccggcgccgtcgtccagtatcaaatcgccgtcaccgaggcggcacacaatgtggtgttgcttcatctgctaaggtgtatggagccgatgttggcgcaaaacgtgcgtcagaactttgaattgctgtatgcccggcgggaaatgctcccgttggtcagcaaccatcgcactcgcattttcgaggcgataatggccggggagccggagcaggcgcgtgaagcgtcgcaccgtcacctggcgttcattgaggaaattttgctggatcgtagtcgtgagcagagccgtcgagagcgctcactgcgtcgtttacagcaacgaaaggacgagaactccggttcttaagcgccatttttagagcgcggcaactaaacgcagaacctgtcttattgaatttttggttgttccagcgtgaagaacgaagagttcaatgggacaggttccagattaatcaacgattagatagataaggaatacccccatgtcagaacgtttacacaatgacgtggatccgatcgaaactcgcgactggctacaggcgatcgaatcggtcatccgtgaagaaggtgttgagcgcgctcagtatctgattgaccaactcctttctgaagcccgtaaaggcggagtgaaggttgctgcaggcgcttccgccggcaactacgtcaacactattgccgttgaagatgagccggaatacccgggcaatctggatctggaacgtcgcattcgttctgcgattcgctggaacgccatcatgaccgttctgcgcgcgtcgaaaaaagatctcgaactgggcggccacatggcgtcctatcagtcttccgcgaccttctacgaagtctgcttcaaccacttcttccgtgcgcgcactgagaaagatggcggcgatctggtgtacttccagggtcacatctctccgggcgtatatgcacgtgcgttcctggaaggccgtctgaccgaagagcagatggacaacttccgccaggaagttcatggcaagggtctgtcctcttatccgcacccgaaactgatgccggaattctggcagttcccgaccgtatccatgggtctggggccgttgggcgctatctatcaggccaaattcctgaaatatctggaacaccgcggtctgaaagacacctccgaacaaaccgtttacgccttcctgggcgacggcgagatggatgagccggaatcaaaaggcgctatcaccatcgccacccgtgaaaaactggacaacctggtcttcgtcatcaactgcaacctgcagcgtctggacggcccggtcaccggtaacggcaaaatcattaacgaactggaaggcatcttcggtggtgctggctggaacgttatcaaggttatctggggcggccgttgggatgagctgctgcgtaaagacaccagcggtaagctgattcagctgatgaacgaaaccgttgacggcgactaccagaccttcaaatccaaagacggcgcttacgttcgtgagcacttcttcggcaaatatccggaaaccgctgccctggtcgctgactggactgacgagcagatctgggctctgaaccgcggtggtcacgatccgaagaaagtctacgctgcattgaagaaagcgcaggagaccaaaggtcagccgaccgtgatcctggcgcataccattaaaggttatggtatgggcgataccgctgaaggtaagaacatcgcgcaccaggttaagaaaatgaacatggacggtgttcgctacgtccgcgatcgtttcaatgtgccggtggcggatgccgatctcgaaaaactgccgtacgtaaccttcccggaaggttccgaagagcacacttacctgcacgctcagcgtcagaagctgaacggctatctgccgactcgtcagccgaagttcactgagaaactcgagctgccgaccctggccgacttcagcgcgctgctggaagagcaaaacaaagaaatctctaccactatcgctttcgttcgcgccctgaacgtgatgctgaagaacaagtcgatcaaagatcgtctggtgccgatcatcgccgacgaagcgcgtaccttcggtatggaaggtctgttccgtcagatcggtatttacagcccgaacggccagcagtataccccgcaggaccgtgagcaggttgcttactacaaagaagacgagaaaggccagattctgcaggaagggatcaacgagctgggcgcaggcgcatcctggctggctgctgcgacctcttacagcaccaacaacctgccgatgatcccgttctacatctactactcgatgttcggcttccagcgtatcggcgatctgtgctgggcggctggcgatcagcaggctcgcggcttcctgattggcgggacttccggtcgtactaccctgaacggcgaaggtctgcagcacgaagatggtcacagccacattcagtcgctgactatcccgaactgtatctcttacgacccggcgtacgcctatgaagtggctgtcatcatgcatgatggtctggtccgtatgtacggcgaagcgcaagagaacgtttactactacatcactacgctgaacgaaaactaccacatgccggccatgccggaaggcgccgaggaaggtatccgtaaaggtatctacaaactcgaaaccatcgaaggtagcaaaggtaaagttcagctgctgggctccggttctatcctgcgtcacgtgcgtgaagcagcgcagatcctggcgaaagactacggcgtgggttccgacgtgtatagcgttacctccttcaccgaactggcgcgtgatggccaggattgcgaacgctggaacatgctgcacccgctggaaaccccgcgcgtgccgtatatcgctcaggtaatgaacgacgctccggcagtggcatccactgactatatgaaactgttcgctgagcaggttcgtacttacgtaccggctgatgattaccgcgtactgggtaccgatggcttcggtcgttccgacagccgtgaaaacctgcgtcaccacttcgaagtcgatgcttcctatgtggtcgtagcagcgctgggcgaactggctaaacgtggtgaaatcgataagaaagtggtggctgacgctatcgcgaaattcgacatcgatgcagaaaaagttaacccgcgtctggcgtaagaggtaaaagaataatggctatcgaaatcaaagtaccggacatcggggctgatgaagttgaaatcaccgagatcctggtcaaagttggcgacaaagtagaagctgaacagtcgctgatcaccgtagaaggcgacaaagcctctatggaagtcccgtctccgcaggctggcgtcgtgaaagagattaaagtctccgtcggcgacaaaaccgagactggcaaactgattatgattttcgattccgccgaaggtgcagccgccgctgcacctgcgcaggaagagaagaaagaagccgctccggccgccgctgctccagcggctgccgcggcagcgaaagaagttcacgtcccggatatcggcggcgatgaagtcgaagtcaccgagatcatggttaaagtgggcgacaccatcgccgctgagcaatccctgatcaccgtagaaggtgataaagcctctatggaagttccggcgccgttcgccggtaccgtcaaagagatcaaaatcaataccggcgataaagtttccaccggctccctgattatgatcttcgaagtggcgggcgctgcgcctgcagccgctccggcacaggctgccgcgccggctgctgcggctccggctgccgcagcaggcgtgaaagatgttaacgtcccggacatcggcggcgacgaagttgaagtcaccgaagtgatggttaaagtcggcgataaagtcgcggcggaacagtccctgatcaccgtagagggcgacaaagcctctatggaagttccggcgccgttcgcgggtaccgttaaagagatcaaaatcagcaccggcgataaagtcaaaaccggttccctgatcatggtcttcgaagtggaaggcgctgcgcctgccgccgctccggctcaggctgctgcaccggcaccagctgctgccccggctcaggccgctaagcctgccgctgcgccggctgcgaaagcagaaggtaaaagcgaattcgctgaaaacgatgcctacgttcacgcgaccccgctgattcgccgcctggcgcgcgagttcggtgttaacctggcgaaagtgaaaggcaccggccgtaaaggtcgtatcctgcgcgaagacgttcaggcttacgtgaaagaagcggttaaacgcgctgaatccgcaccggctgctgccgcaggcggcggtatcccgggcatgctgccgtggccgaaggttgacttcagcaagtttggcgaagtcgaagaagtggagctgggtcgtatccagaaaatctctggcgccaacctgagccgtaactgggtgatgattccgcacgttacccacttcgacaaaaccgatatcaccgatctggaagcgttccgcaagcagcagaatgccgaagctgagaagcgtaaactggacgtgaaattcactccagtggtcttcatcatgaaagcggttgccgctgcgcttgagcagatgccgcgcttcaacagctcgctctccgaagatggtcagcgcctgacgctgaagaaatacatcaacatcggtgtggcggtggataccccgaacggtctggtggttccggtcttcaaagacgtgaacaagaagagcatcaccgagctgtctcgtgaattgaccaccatctcgaagaaagcgcgcgatggcaaactgacggctggcgaaatgcagggcggttgcttcaccatctccagcatcggcggcctgggtaccacccacttcgcgccgattgttaacgcgccggaagtggccatcctcggcgtgtctaagtccgcgatggagccggtatggaatggtaaagagtttgtgccgcgcctgatgctgccaatctctctgtccttcgaccaccgcgtcatcgacggtgctgatggtgcccgcttcattaccatcattaacaacaccctgagcgacattcgccgcctggtgatgtaatcgaaaaagccggcctgacggccggcttttttctgataacctcaggctgttggggattatcagcaacaaaggacaaaatcgtttgccgtttgttgtttaaaaattgttaacaattttgtaaaatacacgcggatagaacgtcccggtggacttgggcgtaagaataatagcgtcagacccgccggatataaattacagaggtcatgatgagtactgaaatcaaaactcaggtcgtggtacttggggcaggccccgcaggttactctgcagccttccgttgcgctgatttaggtctggaaaccgtcatcgtagaacgttacagcaccctcggtggtgtttgtctgaacgtgggttgtatcccttctaaagcgctgctgcacgtggcaaaagttatcgaagaagcgaaagcgctggccgaacacggcatcgttttcggcgaaccgaaaactgacattgacaagatccgcacctggaaagaaaaagtcatcactcagctgaccggtggtctggctggcatggccaaaggtcgtaaagtgaaggtggttaacggtctgggtaaatttaccggcgctaacaccctggaagtggaaggcgaaaacggcaaaaccgtgatcaacttcgacaacgccatcatcgcggcgggttcccgtccgattcagctgccgtttatcccgcatgaagatccgcgcgtatgggactccaccgacgcgctggaactgaaatctgtaccgaaacgcatgctggtgatgggcggcggtatcatcggtctggaaatgggtaccgtataccatgcgctgggttcagagattgacgtggtggaaatgttcgaccaggttatcccggctgccgacaaagacgtggtgaaagtcttcaccaaacgcatcagcaagaaatttaacctgatgctggaaaccaaagtgactgccgttgaagcgaaagaagacggtatttacgtttccatggaaggtaaaaaagcaccggcggaagcgcagcgttacgacgcagtgctggtcgctatcggccgcgtaccgaatggtaaaaacctcgatgcaggtaaagctggcgtggaagttgacgatcgcggcttcatccgcgttgacaaacaaatgcgcaccaacgtgccgcacatctttgctatcggcgatatcgtcggtcagccgatgctggcgcacaaaggtgtccatgaaggccacgttgccgcagaagttatctccggtctgaaacactacttcgatccgaaagtgatcccatccatcgcctacactgaaccagaagtggcatgggtcggtctgaccgagaaagaagcgaaagagaaaggcatcagctacgaaaccgccaccttcccgtgggctgcttccggccgtgctatcgcttctgactgcgcagatggtatgaccaaactgatcttcgacaaagagacccaccgtgttatcggcggcgcgattgtcggcaccaacggcggcgagctgctgggtgagatcggcctggctatcgagatgggctgtgacgctgaagacatcgccctgaccatccacgctcacccgactctgcacgagtccgttggcctggcggcggaagtgttcgaaggcagcatcaccgacctgccaaacgccaaagcgaagaaaaagtaactttttctttcaggaaaaaagcataagcggctccgggagccgctttttttatgcctgatgtttagaactatgtcactgttcataaaccgctacacctcatacatactttgaaaatagtcactcagtaaacttataggtagttaacgatatcaatgaggtgtgagatgaaacgctttttaaccacagcgctggtcgctgcaacgttttttaccggtgtggcttacgccgctgacgccaacattccctgggcggacaacagcggcggtacggaaacgacccacattgcggcgatgggccaggatctgaatgcccagcatcagcaggtgacgaagaccaatgaaggggtatgggcggcgaattccggtagcatcagcgctgacgaagcggcattatccagcacaaaaccagcctttgccggcgatccttctctgatgcctcaccagggctaagtgaatgaaaacgcccggttgcgtgagtgcaaccgggcgttttttttaaggttctgccacttgccagccggcgtcagcgtcgggggtaaaacgcgttatctcctgtgcctttgcggcgctctcttcaccgagattggcctgatagaccctatcctgctgatcgatcataaagctcatcacgccggtttcaccccaggctatcggccaggccagcaaggcgacgctctggtcatcgcgaccggcgataattcgaaagcgatagccatggtagccgctaccgggcaccgtcgggctaaaggccggaccgagcgggcttggcgcttcgcccggcgaagttggccagtacaagccatcttttttgccttcgctactgatgattttctgcgcccagcggtggttcagatgataataatcctgctgggcatcaacataggcatgcatggcggcgatcgccgacagctcattgcggccgatggcgcgggtgaggatctcctcttcgccagcggccatatcaaagcgccatccctcagacgcttttacgataggcacgggcagacgccatgcctcgctaccgacatcgagccaggctttgtcaccctgctggatgatgacatgtttcacctgccagtcgcgttgaaagcgatcgacggcggcagggtcgatcccgtccgtgggtaaaaactgctgccagttatcgccgagtacttcgctcagcgcggcttcattaggctggctgatcgcttcggccagcgcagttgcggcctgttccggcgtggcaaactgctgttgggcgaagacggcaagcggcgacagcattaacgtaaacagggcaacggataatgggtttctcattctgctcatccttagcggcgacgcagttcatggtgttcggaaagacgttctctggtgccatcgcgtaactcgcggtttacgccggaaaactggcggctctgcagtcctcgttcctgctgcgcttgccaggagggggcgcggctttcgttgccgctaagggcgttggcgcgcagatggctgagcgtctgctgacgctgggctggcgtggcggactggaactgctgccggcgctgctgctgctgaggtgtgcggttctgctcgtggctcctggcggcttctcgacgctgctgttgctgcggcgtggggtttttcagctgcgtttttgccgcctcgcgacgctgctgttgggtcggcgtactgtcgtaaccgcggtaattactgcgttgggtggcttgcttcagctgcgccgaggccgcctgacgctgggcgtcgcgtgaggtgttgtttgccgccagattgcccgctgtggccgtcggtacgttatgctgcagctgggtcatcgctgcctggcgctgcgcttcgcgatcgactggcgcatgttgggtcgcgctcagtccgccggaaacgttggtctgatggaagcgctgagctaccgtattatcgggatacggtgtgtgtccgcgataggcaggattgtgctgccagttaacgtggtttcccggcaggttttctcctgttatatgattgaaattatttacattaatattgatgttatcgccattatgcgagtaatcgccgtggtggtagtcgtcatcgtgatggtgatggtcatcatcatcccagtcgatactgctgaacagcgcccaggtggtggccacgccgaggctgtacccgaagcctttgacgaagctatcggtaaattgctccccgggagggggcggcagatagaccggcggataggcgctgttcggccaggtaccatagacggtggaggggttatagctgggaacatagaccacctgtggattggttggctctattttaatgacctgcgtgggcgcaggcgccgctgtgtgggcggttgcggttgctgccgtgctgctgctggctgaaaccggtgcggcaggggtgacaatcactttctgctgcggtgtggatttcagcgtcccggtttgttgggcaatggcgcgcaggcgctgcactgaatccatcacatcatgcggctgggccaaaaacgcattgccaagattttccacccagggcggattctcgcccatcatcgccagcagggcagggaaagcgacaagagatttgacgctagggtcccacggctggctggcaaccgcctgcacggccgcatcccctttcatcgcggggttatcctgggaccactggaccgcctgcaggacgttgtcgggataagtggaggccatcaacacctgcgacagcagactgtccgggtagagcgcgataggggcgacccactgatcaatttgcgcctgggtgtaagtggcggccaccggctgtgtcgtcgacgctgcgggcgctggcgcttgctgcgcaggcggttcagcgatcgtcgctggggttcggctttgcacatagagtgttcctgccgccgcgagtaagccagcgctacagagcagggcgataatatggggtttgaacggcagtgacatggaaactcctgacccaaaaagtaacccatctcgctaaagtatctgcgaaaacggcgcgtttgctgagtataagtaagcggtatggctttttattgattattgttgggatcggcccgtggcgttgtacgcggaaaggaatttttgtcgtgggatttgaacagaaagcctgcaatatcctgcccttaacgattcagctaaattttaatgttgcttttttgtaaacagattaacacctttcaaaaatcctgctatgctgccgacgcggtatcgggcatttaccctacaaactgctgtctcacaggagcgtgaagaaaatcgcccagccactaaatccttcaagatgcgtcacgcggcaagctaagccaggacagaggcagattgattgaagacgtgtaggccgcattatgacaatgagagcgaggagaaccgtcgtgctagaagaataccgtaagcacgtagctgagcgtgccgccatggggattgttgccaaacccttagatgcaacccaaatggccgcgctggtagaactgctgaaaaacccgcctgcgggcgaagaagaattcctgttagacctgctgattaaccgtgtaccgccgggcgtcgatgaagccgcctatgttaaagctggattccttgccgcgatcgccaaaggcgaagcgacctcccccctggttacccctgaaaaagccgttgaactgctgggcaccatgcagggcggttacaatatccatccgctgatcgatgcgctggacgacgcgaaactggcgccgattgccgcgaaagcgctctcccataccctgctgatgttcgataacttctacgacgtggaagagaaagccaaagcgggtaacgagcatgctaaacaggttatgcaatcctgggctgacgccgagtggttcctgaaccgtccgcagctggcagaaaaaatcactgttaccgtcttcaaggtcaccggcgaaacgaacaccgatgatctctctccggcgccggatgcgtggtcgcgtccggatatcccgctgcatgcgctggcaatgctcaaaaacccccgcgaaggcattgagccggatcagccgggcgtggttggcccaatcaaacagatcgaagccctgcagcagaaaggctacccgctggcctacgtcggcgacgtggtcgggaccggttcttcacgtaaatccgccaccaactcggtgctgtggtttatgggcgacgatatcccgaacgtgccgaacaagcgcggcggcggcctgtgtctgggcggtaaaatcgcgccaattttcttcaacaccatggaagatgcgggcgcgctgcctatcgaagttgatgtgtctaacctgaacatgggcgacgtaatcgacgtgtacccgttcaaaggcgaagtgcgtaaccacgagaccaacgaactgctggccagcttcgagctgaaaaccgatgtgctgatcgacgaagtgcgcgccggcggccgtattccgctgatcatcggtcgcggtctgaccaccaaagcgcgtgaagcgctgggcctgccgcacagcgatgtcttccgtcaggcgaaagacgtggcggaaagcacccgcggcttctcgctggcgcagaaaatggttggccgcgcctgcggcgttgccggtatccgtccgggcgcttattgcgaaccgaaaatgacctccgtcggttctcaggacaccaccggtccaatgacccgtgatgagctgaaagacctggcgtgcctgggcttctctgcagacctggtgatgcagtccttctgccacaccgcggcctacccgaagccggttgacgttaccacgcaccacactctgccggacttcatcatgaaccgcggcggtgtttctctgcgtccgggcgatggcgtgattcactcctggctgaaccgcatgctgctgccggataccgtgggtaccggcggtgactcccacacccgtttcccaatcggcatctccttcccggcaggctctggtctggtggccttcgccgccgcgaccggcgtgatgccgctggatatgccggaatcggtgctggtgcgtttcaaaggtaaaatgcagccggggatcaccctgcgtgacctggtccacgccatcccgctgtacgccatcaagcagggcctgctgaccgtggagaagaaaggtaagaaaaacatcttctctggtcgcatcctcgagatcgaaggtctgccggatctgaaagtcgagcaggcgttcgagttgaccgatgcctcggcggagcgttctgccgccggctgcaccatcaaactgaataaagagccgatcgttgagtatctgaactccaacatcgttctgctgaagtggatgatcgccgaaggctacggcgaccgccgtaccctggagcgtcgtatccagggcatggaaaaatggctggcggatccgcagctgctggaagccgatgctgacgcggaatacgcggcagtgatcgacatcgatctggcggatattaaagagccgattctgtgcgcgccgaacgatccggacgatgcccgcctgctgtctgatgtgcagggcgagaagatcgacgaagtgttcatcggctcctgcatgaccaacatcggccacttccgtgccgccggtaagctgctggacagccacaaaggccaactgccgactcgcctgtgggtggcgccgccaacccgtatggatgccgcgcagctgaccgaagaaggctactatagcgtgtttggtaagagcggggcgcgtatcgaaatccctggctgttccctgtgtatgggtaaccaggcgcgcgtggccgacggcgcgacggtggtttccacctctacccgtaacttcccgaaccgtttaggtaccggcgctaacgtctatctggcctctgccgaactggcagcggtggcttcgctgctcggcaaactgccgacgccggaagagtaccagaccttcgtggcgcaggtggataagacggcggaagatacctaccgttatctgaacttcaaccagctggatcagtacactgaaaaagctgacggcgtgatcttccagaccgcggtgtaaaccattcggtcagcccggctgaccgtttggcgataaactctccaatgcccggtgaacattgcatcaccgggcatttttatttccaaacctcccgcccgctacgctttttttctttctgtctgctgcgataattactgcatgggtacagtgcagcggtgacgcattgcccttgcagaggaaaagactatggattacgaatttctgcgcgatattaccggagtggtaaaggtgcgaatgtcgatggatcacgaggcgatcggccactggttcaacgaggaggtgaaaggcaatcttgctctgctggacgaagtggagcaggctgcgcgcaccgtgaagggcagcgagcgttcctggcagcgtgccgggcatgaatatacgctgtggctggatggcgaagaggtgatgatccgcgccaatcagctggagttttccggcgacgaaatcgaggaggggatgagctactacgacgaagaaagtctctctctgtgcggtgttgaggatttcctgcaggtggtcgccgcctatcgtgagtttatgcagcagcgttaatgaccccttttatgtcgggtggcgcagaactacaggcccggcaagcaaaagcgccgccgggcatttcatagattacacggcaggaatattgcggccgtagtaaatctcgcgcatctctttccataacaggtcggtaatgaccttgcgctcttcggcagtcaactcttccggtcgggtatggaacatgtagtgcttaaggtcgaactccttgagcaacattttggtatggaagatattttcctgataaacgttgacgtcgaccatgtcatacaacgacttcatatcgtcggacataaagttctgaatcgaattgatttcatgatcgataaaatgcttcatcccattgatatcgcgggtaaagccgcgcacacggtagtcaatggtcacaatgtccgattccagctggtgaatcagatagttcagcgctttaagcggggaaatgacgccgcacgttgaaacttcgatatcggcgcggaaggtgcacaggccgccctccggatggctctccgggtaggtatgcacgcagatatggctcttatcgagatgggcgaccacggtttccggtagcgggccaggatgttcggtctggtcaatcagcttgggatcgacaggctcttcgctgaccagaatggtcacgctggcgccctggggttcataatcctgacgggcgatattcaggatattggcgccaataatagaacaggtttctgtcaggatctccgtcaggcgattggcattatagagttcgtcgatataggcgatgtagccgtcgcgctcttctgccgttttggcgtaacagatatcgtagatacaaaaactcaggcttttggtcaggttgttaaagccgtgcagcttcaattttttcaatttagttcacccccttatttcgcgtcacggtgcggacagagcatcatgcagatattgtggtaaggcgaaggccgccgtatggattgccggattgtagtaacggcaggtcaggttggctttgtgaaagcgcgcctgaatgatttcgctggagagatggcgcagcgcctcattgtcgctcgcccaggcaaaggtcatgatcccgccgtaataggttggaattgccgcctggtagaagctgacgtcgcgaaaatagtggcttagcttgcgatggctgcctaccgcttcatcctgttgcaggaagcagacgccattctgggcaacaaagatcccacccgggttcaggcagcgtttgcagccttcataaaaagccgaggtgaacaggctttctcccgggccgatagggtcggtacagtccgaaatgatcacgtcaaacgtttgcgtcgtctgattaacaaaattgacgccatcatcaatcaccagcgtaaagcgcggatcgtcataggcgccggcgttatggttcggcaggtactggcggcagaatgaaactaccccggcgtcgatttccaccatggtgatggtttcgatgctacggtgacgagagacttcgcgcagcatcgcgccatcgccgccgccaatgatcaacacatgcttcgcgttgccgtgagccagcagcggcacatgggtcatcatttcgtgatagatgaactcgtcgcgttcggtggtttgtacgacgccatccagcgccatcacccggccaaaggcgcggttatcaaagatgatcagatcctgatgatcggttttttcgtggtacagcacgttatcaacgctaaaatactgaccaaaatggtcatgcagcgtttcatgccacagtggattatcggccacgataaggctcctccttcgttaacatctgttacacccgtaaaacgagtgcaacatcatagacaactatagatgaggatgcacggcggttattgcagcaatgaggcaggaataacagccaccgccccggaagggcggtggagaggatgaggctattttgccggctcgggttggctatctactatccgcacggaataaaccatggtggcgcctggcgggatttttggcggtaatcctttactgccataggccttttcaggcgggacgacgagcgtcacagagccgtggttctgtagacgcttcagcggttcgcgaaacaccgggggataggcatccagcttttgcgtaagcgcctgatctttcgcttccatatcgttgatcaccgtcccgtccgtcagcatctctttgatcaccacggtaaccaggtcgttaccgcttatttttcctttacccgggtaatcgacgcggctgtagacgccctctttaaagaccacatcttttttgcgcgcaaacgcctgctgatatttcttgccggcactgatgtttttctgctctattttattcaggttctgataaacctgctgcgacacatcaaacagcgctttgttacgttcctgctctccgagacgaagctggccgcgaaaggcgtcttcgatgccctgcaacaccaggcctgcgtcgacggtaactccctgagtgcgacgggtggtaaggacgttgagcgcctcgcttcccatcgaggcgccgatcgcataagcctgctgttctcccgatgcgctgagtttggcagcggcgctctcgccgctgcgcgttttggactgtacagaaagctgcgttctcagcagttcgatttcatcttctttcatccgtagctgggcgttgtctttatccgcctgcaggcgataggctgccactatggccgccatctctggtggctcattttttggcgcagcggcgtcgttagcggggccatgcggcgctttatccgcggcggccagccgggtggacagtgattgtttatcggcgttaagggctttgacctgatcgagggcagcctgctgcgtcttttccgcagcggcgaggcgaatagtcagcgactgcttatcggcgttaagggccttaacctgctcgaggacggcctgtttctctttttccgcggcggccagccgggtcgccagcggctgtttgtcagcgttaagcgctttagcctggtcaagagcggcctgctgcgccttctccgcagcggcgaggcgaatagtcagcgactgcttatcggcgttaagggccttaacctgctcgaggacggcctgtttctctttttccgcggcggccagccgggtcgtcagcggctgtttgtcagcgttaagcgctttagcctggtcaagagcggcctgctgcgccttctccgcagcggcgaggcgaatagtcagcgactgcttatcggcgttaagggccttaacctgctcgaggacggcctgtttctctttttccgcggcggccagccgggtcgccagcggctgtttgtcagcgttaagcgctttagcctggtcaagagcggcctgctgcgccttctccgcagcggcgaggcgaatagtcagcgactgtttatcggcgttaagggccttaacctgctcgaggacggcctgtttctctttttccgcggcggccagccgggtcgtcagcggctgtttgtcagcgttaagcgctttgacctgctcaagagcggcctgtttctctttttccgcagcggccagttgggtcattagcgcgtgtttatctttattaagcgtggtaaagctggcgctgaggcgtttattttcagcttcggcttgctgaatctgcgtcgttaattgctggatctgctgacgtgccgcggcctggctttgctgtagattattattctgcacaacgcctgctttttttattaatgcctctttttctgcagtagcggcgcttaaggcgacctgtaattcattaattctcttattcaacgccgcttgctcattcgctccggcagtatccgtttgcggcgtagcggcaagctgtttttttaattgctgtataagcttatctttttgtgcaatcgccgcctgctggctggtgattcttttttgtaattgtgaggtgctggtaccggtttttttattatctgcgctctggcggctttcttgtgtttgttttgcgcttgcggcatcgtttttttcttgcgcctgagattgctgggtttgctgttgggcgtaatcaagaaaggccggcgcggcgccggcggtgaagggggttgaaagcgccagcgcagcgacgagcatcagcaggggcgcgttgagggtcagcgtggcggctctgttcatggctgtttgctttcaccacgctgtaccaggctatcgatcagcgttttctggatatcggcgcacagtttgatggatttaaactgatacatggagtcaatgccaagccgggtaggatctgccactttctcgcgcacgctattatattgtgacgccgcgcgcactaaagcgttaaagtcattgctgagtttagtggcttgctgtgggttaacctcttttagcgaatccagcgcctggcgacaggattcaatgcgcgcttgttcgctggctgcccgctcctgctctgcctgctgctgtgtcgtcagcggcgtggcgatcggtttaaccggctggcgggaagaggtattgctacagccggctactaacagcgcggcgagtgggataacacgaagagtcagcgagatattcacaatttcagtccatgaagtaggtatatttttaccggattctagaagggtgctttttattttgcaatatatgaataatgatattttattagttttttagtcattcttcattattatgggtttactttatttggcaaattgataggttcgcaattaaataaggtttgtttatatacaataataaatataaatatttaaagggggaagttgaaatgctaaaggcgcggagcgttgccgcccgcgcagggaattatttaacgtaagccagcaggctgagcgaatcgcgggccagcgctttacattttttcgccgtcggaatgttaatgccgctaagatcgcgatagctgtcttcgccaagcgctttcatgttgtagctgtcatagttgctcaggtcccactggttctgttgggcaaagaacaccagcgcgcgacggatctgcgtgttgggcaggttctggtagccacagtcgtttttcagaaacacaaaaaccgcggttaaatcagccatatcttccgcttcggattcgctgagcgcgtagctgttggcggagagagcaagcaggctgccgagtaccattgttctgaaaagcgtcttcattttttctaccattagatcaccgacgcttcaaattagcatacttctttacacagcgccgatctttattcttactcttctgcttgaccttcccgttacggtagggtttaagctcaaatattcgcccgcagaataaaaggatgtgaatatgcaacgtcgagacttcctcaaactgaccgccgcggtcggcatggccagcgcattgccgttatggagccgggcggtctttgccgccagtcgcccggctctgccgataccgtcgctgttagccgccgatgcgcgcaaccgcatcgcgctcaggatccaggcgggcaaaacgcggtttggcgccctgaatgccactacctggggctacaacgggtcgctgctgggccctgcgctgcagttgacgcaggggaagaccgtcacggtggatattactaaccagctggcggaagagaccacgctgcactggcatggtctggaggtaccgggcgaggtcgacggggggccacagggggttatcgcgccgggtgccacccgcacggtaagcttcacgccaacgcagcgggcggcgacctgctggtttcatccgcatcagcatgggagcaccggccggcaggtggcgatggggctggccggcctggtgctgatcgaggatgaagagagcgggcgcctgctgctgcctaagcagtggggaatcgatgatgtgccggtgatcgtccaggataagaagttcaccgccgccggcgagatcgactatcagctggatgtgatgagcgccgccgtcggctggtttggcgatacgctactgaccaatggggccctctatcccgaacatgccgcgccgcgcggctggctgcgcctgcgcttgctgaacggctgtaatgcccgttccctcaattttgccaccagcgataagcgcccgctgtacgtggtggccagcgatggcggtctgttggccgagccggtcaaggtcgatgaattgccggtcttgatgggtgaacgctttgaggtgctggtggacaccagcgacggtaaacctttcgatctggtgaccctgccggtgagccagatgggcatggcgattgcgccttttgataaaccacagccggtactgcgcgtccagccgctggtcattcccgcctccggcaagctgctggatactctggccgctctcccggcgttaccgtccctgacggggctgacgcagcgtcagctccagctgtcgatggatccgatgctcgaccggatgggcatgcaggcgctgatggagaagtatggcgaccaggcgatggccggaatggatcacggcatgatggggcatggcgacatgagcgacatggggaatatgcatcacggcgacatgagcatgaaccacggatccggcatggagcatggcatgtcgtcaggcaagggctttgatttccataacgccaaccgcatcaacggcaaagccttcgacatgaatgagccgatgtttgccgccgccagaggccagtatgagcgctgggtgatttcaggtaagggcgacatgatgttgcatccgttccatatccacggcacccagttccgtatcctcagcgaaaacggcaagccgccagcggcgcatcgtcgcggctggaaagacaccgttcgtgtggaaggggacgtgagtgaagtattagtgaagtttgatcatccggcgccgaaggagtttgcctatatggcccactgccacctgctggaacatgaagacaccgggatgatgttggggttcacggtttaagtctctgcgacctgctgccatcccctacgggaagaaggacggaacaccaaaaaaaacggcaactttcgttgccgttttgcgttttatttggcgtcatccgggagcgcataggcgacaatataatcgcccattttggtaccgaacgagccgtgaccgccggcagagatgacaacatactgtttgccattcacttcgtaggtcatcggagtcgcctgaccgccggctggcagacgggcttcccatagcttctcgccgttgctcatattgtacgcgcgcaggtagttatctgcagtcgcgccgatgaacaggacgttaccggccgtggaaatcggaccgcccagcatcggcatccccatggtaaacggcagtttaaccggcatcgggaacggcaggctgtcctgcggagtaccgatacgttttttccataccacttcgttggttttcagatccagggcggagatatacccccaggccggctgtttgcacggcaggccgaacggcgacaggaacgggttcagcgttacgccgtacgggacgccgtactgcggctgcacgccggactcggtaccagagcctttcgcatctttcggcggctccatcggattgcctggcccgcgcgggatcagttttgagacgaaaggcagcgccatcgggttggcgatagccacctgacggttcggatcgacggagataccgccccattcaaacatccccaggttacccgggaacaccagcgtgccctgctcagacggcggggtgaagataccttcatagcgcagctggtggaagatcacgcggcacaccagctggtcgaacatagtggcgccccacatgtccgcgccggtcagatctttcttcggacggaagctcagatcggagaagggctgggttttggtaacgtaatcacctttggcagcgccctgcggtactggtttttccggcgccgggaccaccagctcgccgttacgacgatccagcacgaagatgttgccggttttcgccggggcatagatgaccggtacggttttgccgttgacctcaatatcagccagcgtcggctgggaaggcatgtccatatcccacagatcgtgatggacggtctgatagctccaggccagcttaccagtggtggcgttcagtgccacaatcgagctggcataacgctcttgctccggcgtacggttgccgccccagatgtccggagtggtcacgcccatcggcagatagaccagatccagcttagcgtcgtaggcggcaggcgcccatgagttcggcgagttgagcgtgaagtgatgttcatcgctcgggatggcgttcggatctttcgcacccggatcgaaggcccacagcagtttaccggtattcacatcaaagccgcggatcacgcctgacggctcgcgggtagagaagttatcggtgaccgcgccggcaatcacgatggttttatcggtgatgatcggcggtgaagtgggttcatacatgcccggcgtggtgaccggcatgttggtctgcagattgagaatacctttattagcaaaggtttcgcacagcttaccgttgtcggcgtttaccgcgaacaggcgaccatcgttcaccggcaggataatgcggcgcggacagtcggcgacgacgtcggcaggggcgttatccgctttcgcttcgtgataagaaacaccgcggcaggtgacgtgctggaacgacggatcggcgttcagctgcgggtcaaaatgccacttctctttaccggtggcggcgtccagcgcaaacaggcgctggtgagcggtacacaggaagagcgtatcgccgactttaatcggcgtcacttcgttagtgatttcacccggatcgttcggctgtttcaggtcgccggtgcggaacacccaggcttccttcaggttcttcacattatcggcgttaatctgcttcagcggggagaagcgctggccttcctggttacggccataggccggccagtcgccgtcggcgacggtggaaatcggtgcggccggcgtagcgtcggcgctcagggtgccgttgacttcctgcgggtcgttaaaaccagcccaggtcagcatgccgccgctgatcagcagggcgacgaccagcgcgccaacggcgccagcggaaggcaccggcagacgacgccagacaaagggcaggatcagccagatgccaaagaagacgaggatatcgctacgcggcgtcaacgcccagaagtcgaaaccaacttcccagacgccccagatcatggtcgccagcagcagcgcggcgtacagccacagcgcagcgcgcttgccgcggaacagcattacggtcacgcccagcatcaccagcccggcgatagggtagtaccaggagccgccaagcacgaccagccatgccccgccgattaatagatagaggccgcagaacgctgcaaatagcgcagtcagcgtcaccaggagccttgattgttgagactttgtttcagccataaaaagttactcatgtgtttgttaaattttttaactgcaattaattataggatttaacaagtgtgatcggaatcacaaatatggctttattaatccctgcaccgaagatttctttttgctggtatactggatggcttgccggtcatcgtcggggcgaaagcagcggctttgatgatttatatttagaatcaaatggttagtattatgaaacatactgtagaagtgatgatcccggaatccgagatcaaagcgcgtatcgcggaactgggtcgtcaaatcaacgaacattatcagaacagcggcagcgaaatggtgctggtggggctgctgcgcggctcgtttatgttcatggccgacctgtgccgtgaagtgcaggtgccgcatgaagtcgattttatgaccgcctccagctacggcagcggcatgtccaccactcgtgatgtgaaaatccttaaagatctggatgaagacatccgtggtaaagacgttctgatcgtggaagacatcatcgactccggcaataccctgtctaaagttcgcgaaatcctcagcctgcgcgagccgaaatcgctggccatttgtacgctacttgataaacccagccgccgcgaagtgaacgtcccggttgaatacgtcggtttcgcgattccggatgagttcgtggtgggctacggtatcgactatgctcagcgctaccgccatctgccgtatatcggcaaagtcaccctgctggacgagtaaggggatatcccactctggacagcgcgcgccgcgctctccagggtggcgaagtctgaaggctatctgtggttgatgtgcttgatcttgaggttggagatcccgtggcgatagcgctgttcgagggtttccctgctcacagcggtgacatccagatcgcgcagcagtccgtcgtgaatcccgtaagcccagccgtggatggtcaccttctgtccgcgcttccacgcggattgcataatcgtcgaatgtcccagattgtacacctgttccatcacgttcagttcacaaagggtatccagacggcgctcctctggcatttcaccgagcagcgagctgtgcttaaaccagatatcgcggatatgcagcagccagttgtcgataagccccagctccgggttctccaccgccgcctgcacgccgccgcagccgtagtggccgcagataataatgtgctcgacttccaggacatcgacggcatactgcaccaccgacagacaattgagatcggtgtggatcaccaggttcgctacgttacgatgcacgaacagttcgccaggctccaggccggtgagtcgctcagcgggaacgcggctgtccgaacagccaatccacaggaagcgcggtttctgcgtctgcgacagtttctcaaaaaagccggggtcctcttccaccagcatttttgaccatagtgcattgttgctgatgagtgtatctatatcattcatggacgttatcggcctgtaaccaagtaagtgcgttgcgctaatatagggtaagctcaccttttttaaaaccatcttaacccgtgatacttcaggctgcagatgcgttggcggcgtcagcgccggtccagcgcaaacgtgagtcaggcgggttaatgacgtgtcacgacacgagaagagatatttaatgaccattgctctggaattaaaacagctcaaaaaaacctatcccggcggggttcaggcgctgcgggggatcgacctgcaggtcgaagcgggggatttttatgccctgctgggcccgaacggggccggaaaatccacgaccatcggcatcatcagctcgctggtgaacaaaacctctggtcaggtcaatgtctttggctacgatctggagaaagacgtcgtcaatgccaagcgccagcttggcctggtgccgcaggagtttaacttcaacccgttcgaaaccgtgcagcagatcgtcgttaaccaggcgggctactacggcgttgagcgtaaagaagccctttcccgcagtgaaaagtatttaaaacagctcgacctgtgggaaaaacgcaacgaacgcgcgagaatgctctccggcgggatgaagcgccgtctgatgatcgcccgcgcgttgatgcatgagccgaagctgctgatcctcgacgaaccgaccgccggcgtcgatattgaactgcgtcgctcgatgtggggctttctcaaggatctcaacgatcgcggaaccaccattatcctgaccacccactatctcgaagaggccgaaatgctatgtcgcaacatcggcatcatccagcacggcgagctggtggaaaacacctcgatgaaagcgctgctgtcgaagctgaagtcagagacctttattcttgacctcgcgccaaaaagcccggtgccgaagctcgaaggctaccagtaccagctggtcgatacctcgacgctggaagtggaggttctgcgtgagcagggaattaacagcgtcttcgcgcagctgagcgcccagggggtgcaggtactgagtatgcgtaacaaagccaaccgtctggaagagctgtttgtcacgctggtgcatgagcgaaaaggagaatcagcatgatgcagctttattgggtcgcgctgaaaagcatctggaccaaagagatccaccgttttatgcgcatctgggtacagacgctggtgccgccggtgatcaccatgaccctgtatttcgtgatctttggcaacctgatcggctcgcgcattggtgagatgcatggttttacctatatgcagtttatcgtcccaggcctgatcatgatggcggtgatcactaacgcttacgccaacgtcgcctcatccttcttcagcgccaagtttcagcgcaatattgaagagctgctggtggcgccagtgccgacgcatgtgattatcgccggctacgtgggcggcggggtagcgcgaggactgtgcgtaggtatcctggtgaccgcggtgtcgctattctttgtgccgttccaggttcactcctggctgtttgtcgccctgacgctgctcctcaccgcggtgctgttctcgctggccgggctgctgaacgcggtgtttgccaagaccttcgatgacattagcctgatcccgacctttgtgctgacgccgctgacctatctcggcggggtgttctactcgctgaccctgctgccgccgttctggcaggggctgtcgcatctgaaccccatcgtctacatgatcagcggttttcgcttcggcttcctcggtatcaacgacgtcccgctggcgaccaccttcgccgtgctggtggtgttcattgtcgccttctatctgctgtgctggtcgttaattcagcgcggtcgcggcctgcgtagctgatactcatcatggttagcgcttcctgaagtaaatatgcgaagcgctaaccgcttatctttgactcccatcaccgatacgtcatcttcaccttgctacattattcgctggctaaggagggaagcatgctcggatgggtcattacctgtcacgatgagctggcgcaggagatgctggatcgtcttgaacaaaagtttggtccgctggcccagtgccgggcggtcaattactggcgcaatctcagcagcaatatgttgagccggatgatgtgcgatgcgctgcatgccaccgactccggggacggggtcatttttctcactgacaaaaccggtgcggcgccttatcgggccgcggcgctgatgagtcacaaacatacccactgcgaagtgatctccggcgtcagctatccactccttgagcgaatgtatctcctgcgaggcacgttaagcagcgtggcgtttcgccaggcgatcgtcagcgcgggcgggccgatggtgagcagcctgtggcatcagcagcagaagaaccccccgttccggttgcgccatgatgcctggggaaattaagcagcgggacagataccgcttttgttacaataaccgccgttgatggtataacggtttgatgcgtatgcttgcccgatttttgaccctgcttcttttcctgacctcactcagcgcctccgccagcctgcttagccagcacggcaaggctgtgcgctatatgcaaaccaccgaagacgcggtcatctgggcgcaggtgggaaaccatgtggtcagcgtcggcaatgttcgtgccgggcagatcctcgcagtcgtcccgacggcggctgactactatgagtttcgtttcggctttggcaccgggtttattgataaagggcatctcgagccggtgcagggcaagcagcgggtggaggaccgtctgggggatcttaataaaccgctgagtaaccaaaatttactcacctggaaagatacaccgctctatgacgctccctcggtaagcagcgcgccgttcggcacgctggccaacaatctgcgctatccgatcctcagcaagctgaaggaccggctcaatcagacctggtttcagatccgcattggcgaccggctggcgtgggtcagtagtctggacgcgcaggaggatcacggtattcccgtgctgacctatcaccatattctgcgcgatgaagagaacacccgttttcgtcatacgtcgaccaccacctcggttcgcgccttcacgaatcagatgacctggctgcgcgatcagggctataccacgctgaccctgtatcagctggaaggctatgtgcgtaataaaatcaatctcccggcgcgggcggtggcgatcactttcgatgatggcttgaaatcggtgaaccgctacgcctatccggtgctgaaacagtacggtttccatgccaccgcgtttattatctcctcgcgtattaagcgccatccgcagaagtgggatccgaaatccctgcagtttatgagcatttccgagctacgccagatccaggacgtttttgatattcagtcgcatactcacttcttgcatcgggttgacgccggccggcggccgattttattcagtcgcaattaccataatattctgtttgatttcgcccgctcgcgccgggcgctgagccagtttaatccgcacgttctctacctttcctatcccttcggcggctataacgctacggcggtgcaggcggcgaatgacgccgggtttcatatggcggtaacgacggtgcgtgggaaggtgaagccgggggacaatccgtttctgttaaagcggttatatatcttacgaacggattcgctggagacgatgtcgcggctgatcagtaaccagccgcaggggtaataccgacgctgcgcctgagcgcagcgtcgcggccatcaggcgacctgtaccggaatagcttttgcctggcgcttcatttcgttgtcgccttcgaagtaggcgatgttaggctgccagctgcgcgcctcttcgtccgacatggtaacgaagctggcgatgatcaaaatatcgccgacgctggcgcagtgcgcggcggcgccgttaacggagatgatccgggagccccgctcggcggcaatggcgtaggtggagaaacggttgccgttggtgacgttccagaggtgaatagtttcattctccagaataccggccgcatccaggaagtcctggtcaatggcgcaagaaccttcatagtgcaggtccgcctgcgtgacttttacgcggtggagcttgccctgcagcatattacgcatcataacttctacccttcaaccttaatgtagcagagcggacacggcgcccgccctgagaaaagcccgggcagtattgcccgatttttacccgctgtctactgagcgagcgtgacgatccggttgtcgatcaggcgagcctgccccagccaggcggccatcaggatcaccgcgcgctggctggcatcggtcagctcaagcagggtgtcggcatcgcggatctgaatgtcgtcggcgcggaagcctttctcattcagctcctgttcagcgatagcgatgatctcatcgagctgccgatcgccggcggccagcttttccgccaccgcgctcagcactttatacagaccaggcgcgattttgcgctggtcggcggtcaggtagccgttacgcgaactcagcgccaggccatctttcgcgcggacgatcggcacgccgatgatctcaatgtcgtagcccatatcggcgaccatcttgcggatcagcgccaactgctggaagtctttctcgccgaagcaggcgacgtctggttgaacaaggttgaacagcttactgacgatggtcgacacgccgcggaaatggcccgggcggctggcgccttcgagcatggtggataatcccggaacgtcgacgtaggtctggccttcagtaccctgggggtacacttccgccggcgtcggcgcgaagacaaagtcgacatgacgtttgttcagcttttcgcaatcatcctgtaaggtgcgcgggtagcgcgccaggtcgtcgacgcggtcaaactgcatcggattgacgaaaatactgaccaccaccacgtccgcactggctttggcttcatcaaccagcttcatatgaccatcatgcaggttgcccatcgtcgggaccaacgcgatacgcttaccctcctgacgcagacggcggatatgctgccgcagcagcagtacggattcaataatcagcacaacaagactccttaatggaaactgtgttcttcacccggatagactccggattctacttcggcaatatactgccgcaccgcggcgcggatgtcgcccgcttcggcaaggaaattcttggcaaatttaggaatgtggccgccggtaatgccgaaagcgtcatgcatcacgaggatttgcccgtcggtgacgttgcccgcgccgatgccgatcactggaatggtcagagcgtcggtgatgcgcttcgccagttcaaccggcacgcactccaggaccaacagctgcgcacccgccgcctccagcgctaacgcgtcttcaaacagggtctgcgccgcatcgccgcgaccctgcactttatacccaccgaatacgttcaccgactgcggcgtcaggccaagatggccgcaaaccggcaccgcgcgctccgccagcatcctcacggtgtcggccagccaggcgccgccctcgagtttgaccatattggcgccagcgcgcatcacgatggcggcatttgcaaaggtctgctcgggggtggcataggccatgaacggcaggtcggcaagcagcaggctgtttggcgcgccgcggcggacggcgcgggtgtgataggcgatatcttccacggtaaccggcagggtggagtcgtgaccctgcaccgtcattcccagcgagtcgcctaccagcagcacatttatgccttcatcggcgaacagcttcgcgaagctgtgatcgtaggcggtaatggtggcaaagcgcttcttttcctgtttgcatttctgcagcagggcaatggtggtcggtttcataacatttcctgatgatgaaagtcatattaaccggcattctaacagcagcattcagaggggcaatgattttgggcaaccgattacgacgatcgccgcaaatgctaaaaaaggcgaggggattaccagctggcgggctttgccgcgccgagattatccagcacggcgcgcagcgccaggccgtcaggaaagtgaaggtccggggcgatctcgaacagcggccagagcataaagccgcggtttttcatatcgtagtgcggaacggtcaggcgctcgctgttaatgacagcatcgccaaacagcatgatatcgaggtccagcgtgcgcggcccccagcgttcggctttgcgcactcgcccctgctgcagttcgatgcgctgagtatgatcgagcagcgtctcggggggcagggcggtttccagcgcaacggcggcgttgagatagtccggctgatcctgcgggcccagcggcggcgtgcggtagaacgaagagacggcgaccacgcggctgtgcggaatttcgcccagggcgcggatagccgcctgcacctgctccagtggagaagcaaggttgctgccaagagcgatatagaccagagtcatgcgctaccctggcgcggcgcgcgcttgcgcggacgacggtgacgacggcgcggcgcaggatcgtccccgaggtcgttgagcatatctttttgcgccggcggcgcggcgacctggaattcgccccaccatttggtcaggcgctgcagttcgtggttgttctcggcgccggcgcgtagctccagcaggtcataggcggcgcggaatttcggatgctccatcagcttccaggcgcgtttgccctgacgacgggacatgcgcagctgcagctgccagatatcacgaataagggtggtgatgcgcttagggatcgccagcgtacggcaggcttcgtccagcacatcgttcatcgccagggcgaaggcgtcgtagtacgccaggccgctctcctgagcgattttttgcgccgtctccagcagcggataccagaacatcaccgcgaagaggaaggccggattgacgcgcatatcgttatgaatgcgggtatcggtattcttcagcacctggctgatgatccgctccatcgggctgtcgccgcgctcggtaaagtagcgggtgatggtcgggaacagcggctggaacaggctgtattcccgcagcagcatgtaggtctggtagccatacccggcctgcagcagcttgagcacttcttcgaacagacgcgccggcggcacatcgtggagcagggcggccaggcgcggcagcggttcagccgtttccgggctgatggtcatattgagcttggcggcaaagcgcaccgcgcgcagcatgcgcactggatcctcgcgatagcgggtttccgggttgccgatcagacggatcacgccgtcctgcagatccttcatgccgccgacgtagtcgcgaacggtaaagtccgccacgctgtaatagaggctgttgatagtgaagtcgcgacgctgggcatcctcctcgatcgagccgaagatgttgtcgcgcagcagcatgccgttctggccccgctgggaggtgacgcgatcggtggtatgcccttcgtgatggccacggaaggtggcgacctcaatgatttccggcccgaacatcacatgcgccaggcggaaacgtcgcccaaccagacggcagttgcggaacagcttgcgtacctgatccggcgtggcgttggtggtaacgtcaaaatcttttggctttttgccaagcagcaggtcgcggacgccgccgccgaccagccaggattcgtagcccgccttgttgaggcggtacatgaccttgagggcgttttcactgatatctttgcgggaaatagcatgctgctcacgcgggatcaccgtcataggcgttggttcgacggcggcttctgcctcgcgctcctcacggcttagcaccttacggcaaaaattagcgactcgggtaaaaatggtgcacctcgtagtgtcagacggacttcagatcaactgtacagtgtaaaaatagcggctaatcatagctcagcgggagccatttgagaatgctcgattttcgccggctgccagttggcgacggcctgggcgagtaaatcatcgatgttcagggcctgccactcctcggggatcgcctgattcagaaagcggagcgcccggacgatttcggggcgcggatcgccttccggcagcgccggcgcgtggttttgtttagagagtttattgccgtcgccattgagagccagcggcagatggaggtaatccggcgcctgccagccaaaatgctgatacagcgaaatctgccgcaccgtcggctcaatcaggtctgcgccgcggacaatctcggtgatcccctgaaagtggtcgtcgaccaccaccgccaggttgtaggcgaacagcccgtcgcgacggtggataataaaatcctcacgcgccagcggctcattggcgatgagcgtgccgcgcagacggtcgctaaactgcagcaccggacgggtttggcgcaggcgcagcgcggcgttttccgcccccagcccgagatcgcggcagtggccgtcgtagatcccgcccacggcgtggatccgcgcgcgggtgcaagtgcagtaatagctcagcccttgctcgcccagccacgtcagcgcctcgcggtaggcttcgtgccgttgcgactgccacagcacgtcgccatcccagtgcagaccgtagtggtcaagctggcgcaggatggtatcggcggcaccggggacttcgcgcggcgggtcgatatcttcaatacgaacacgccagataccctggttcgcgcgggcttgcaggtagctgccgagcgcggcgatcagagagccgaagtggagttcgccggagggggagggggcgaagcgccctatatagcgtgagtcagtcatggtacggacaacagaaccaggcgggagagactcccgccagagagtgaggcagcaggggattagcccgccatctgtttttcgcgaatttccgccagggttttgcagtcaatgcacagatccgctgtcggacgcgcttccagacggcgaatgccgatctccacgccgcaggattcgcagtagccgaagtcttcgtcttcaacttttttcagcgttttctcgatctttttgatcagtttacgttcgcggtcgcggttacgcagttccaggctgaactcttcttcctgggcggcacggtctaccgggtccgggaagttagctgcttcatcctgcatgtgcgatacggtgcgatccacttcatccctgagttgattacgccatgcttcaagaatacgcttgaagtgcgccagctgggcttcgttcatatactcttcgcccggtttctcttggtacggctccaccccagcgatggcgagaatactcagggacgatgttttacggttttgcccttcttgcatgttgcttctccttaacacgcactatcgatccccatgtgggggaaaatcaggccgctataaatagcagatgcttttccggatagcaattatctaaacgttacacttgacaaccctgtgaagaaaagcgtattcgcgcttgcgacccgaacactatttagccacttatttaccggggtttaacaccacggcgatcggcttattcagagtcatcctcgtcgtagaaagttccgctttccaggcgagaatttccacccccttgtcctgggcttctgttaacagctgtgcgtatctggcatcaatatgatgcgcgggagaaaaacggtcaattgccgaatgcaggacggcaaataaaatcaccgcgcggtcgccatttgccgcgacggccatcagttcccgcaggtgcttctgaccgcgcgtggtcaccgcatcgggaaaataaccgtattctttctccgccaacgtaaccgatttcacttcaatatagcagttttgtcggtcatctgcctgtaacataatatcgatacggctattctcttcgccatatttcacttcgcttttcagctggttatagcctgaaagttcaggaattattccggcggaaatcgcctctttcgccaaagaattcgcgcgcagcgtattgacgcaaataactgcgccctgctgggtttcagttaattcccaggtgtgggcatatttgcgcttcgcattgtctgaggtggaataccagacggtgtcgcccggggcggcgcagccggtcatcgccccggtattcgggcagtggagcgtcagctcgcggccatcgggggtgaccacgtcagcaagaaatcgtttgtaacgtttaagcaaaatggcgggctgcaacggcggatcaaactgcatcaactttccttatcaaacggataacgttccagcgccgtgtagcgcgtgcgcccccggctaaagctggactcatagagcacgaactcgttcaccggaaacgtccagcgaaagccgggggccgggatcggcaccgcctggcgagcatcgcgccacagggtaatatgcgggtgaaacggctgcgggctctgatagcagccgctgcgcgccgcctgagcgcgcaacatgctggcgagctgcagcaggccgcgcggcggctggcgggttccgagccacaccactcgcgaacgtagccactgtccggcatcgtccagcgtcagggtaaagcccggctggcgcaggcgaccagcgagagcggccagcgcccgctgtttttccgcgctcacctcgccgagaaacgccagcgtcagatgaagattatccgccgcgacgggcctgccggcatcttcggggaagtgcgttgcccgccactggacaatctgcttctggacggcagacggcagttcaagcgcaaaaaacagccttttcggctcagacatgatagagactcggtaatgaattagggggatgctacaatgcgaacccctgaatgttaacccccggagccttttgtgtcctcattgccggttgccgctgtccttccagaactgttatccgccctgcagcatgcgccgcaggttttgctcaacgcgccgaccggcgccgggaagtcgacctggctgccgctgcagatcctcgccgagggcaacatcgcgggacgcattatcctgctcgagccgaggcgcctggcggcgcgtaatgtcgcgcagcggctggctgaactgcttggcgaaaagccgggggagaccgtgggtttccgcatgcgcgccgaaacctgcgtcggaccgcagacccgcctggaggtggttacggaggggatcctgacgcgcatgatccagcgcgatccggagctgacgggcgtggggctggtgatcctcgatgagtttcacgagcgcagcctgcaggcggatctggccctggccctgctgctggacgtccagcaggggttacgtgacgatctcaagctgctgattatgtcggcgaccctcgataacgatcgcctgcagcgtctgctgccggaggcgccggtggtggtctcggaggggcgcgcttatccggtggagcgtcgcttcagcccgctctccgcgcaccagcgttttgatgaggcggtggcggtagcggcggcggagctcctgcggcatgcacagggatcgatgctgctgtttctgcccggcgtcggcgagatccagcgcgttcaggaacagctgacggagcgcgtggcggaggatgtcattctctgcccgctgtatggcgcgttgcccttaagcgaacagcgcaaagcgatcctcccggcgccggccgggaagcgcaaagtggtgctggccaccaatattgccgagaccagtttgaccatcgaggggatccgcctggtggtcgacagcgcccaggagcgggtcgcccgctttgatccgcgcaccggcctgacccggctggtgacgcagcgcatcagccaggcatcgatgacgcagcgtgccggacgcgccggtcgtctctccccggggatctgcctgcatttgctcggcaaagaacaggcggaacgggcggcggcgcagagcgagccggagatcctgcacagcgatctgtcggcgctgttgctggagctgctgcagtggggctgccacgatccggccgcgctggcctggctggatcagccgcccgcggtcaatctggccgccgcgcgtcgcctgctggaggcgctgtcggcgctggacggcgagcggctgtcggcgtttggccgcaaaatggcagcgcttggcaacgagccgcggctggcggcgatgctggccgccgcacagaccgatgacgaggcggcgacagcggcaaagctggcggcgatcctcgaggagccgccgcgcggcggactggtggatttgggggccgtcttttcccgtcagcaggccaactggcagcagcgagcgcagcagctgatgaagcgcctggcccgccgcggcggccagcccgatgtcgggctaatggcggggctgctggcgtcggccttcgccgatcgcatcgcccgccgccgcggtcaggaggggcgctaccagctggcgaacggcatgggcgcgatgctggacgccgacgacgcgctgggccgtcatgaatggcttatcgctccgctgctgctgcagggcagcgcttcgccggatgcccgcatgctgttggctctgccagtggaaatcggcgagctgatcgccgcccgccctgaactggcgaaaagttccgacacggtggagtgggatgaagcgcaggggacgctgaaagcctggcggcggacggtgatcggccagttggtgatcaagacccagccgctggcgaagccctctgaggcagagctgcatcaggcgatgctcaacggtattcgtgagaaaggcctcggggtgctcaactggacgccagaggctgagcagctgcgcctgcggctgcactgtgcggcgcagtggctgccggaagaggcatggcccgcagtggatgacgcttcgctgctggcctcgctggaggcatggctgctgccgcagatgaacggcgttcattccctgcgggcgctgaaggcgctggatctgcgtcaggcgctacaggactggctgccatggccgctgcgccaaaagctggatcgcgagctgccgacgcactataccgtgccgaccggcagccgcctggcgatccgataccatgcggagaacccgccagcgctggcggtgcgtatgcaggagatgttcggcgaggccacgacgccggtgatcgccgaggggcgggtgccgctggtgctggagctgctgtcgcctgcccagcgtccgctgcagatcacccgcgatctgagcgccttctggcaagggagctaccgcgaggtgcagaaagagatgaagggacgctatccgaagcacgtctggccggacgatccggccaacgccgccccgacccgccgcagcaaaaaatactcgtagccgccgctgccgggcggcatcctgcccggccagtcggttcgcaaacgctagaccatctgctgccagagaaaaatacccccgccggccagcgccagccaggggccgaaggccagcggctgctgcagcgactgccgggtccacaggcgttgcagtagggtccacaccagcccgctggccgaagcgagcaacagcacctgcggcagaacctgccagccgcaccaggcgcccagcgccgccagcagcttaaaatcgccatagcccagcgcctctttcccggtcagcaggcggaacagccagtagaccgaccacagcgccagataaccggccatcgccccggcgaccgcatccggcagggcaatgtacacctcgttaagattgaacagcagcccggcccacagcaggggcagagtcaggcgatcgggcagcagctgggtccgggcgtcaatccgcgccagtatcagcaggaacgagagcagcaccaggccgcccgccagcggcaggcccggcgccagcaaagctccggcgaggataaacagcaggccggtggccagctcggtcagcggatagctccacgcgatgggcgcctgacagcagcgggcgcgacggcccagccagaggaaactgagcagcgggatattgtcccgccaggcgatcggctggcggcactgcgggcaggaagagcccggggtgctgagggttatccgctcgtcgtccgcggtctgggtcaacatgcgcggcagacgatagatcaccacattgtaaaagctgcccagcgccaggccgaacagcagtagaaagccataccagacaaagggaaagtgcagcgataacgcggctagtgtcgtcatttttgctcctgtggtaaccattttccctgcagctgccacggcgtcgggcccggggcgttattcgctgtcgggcgcgtgaccagcagcgccagcagcggcggcatcccctgccggggctgtagcgtgccgcgaaacagatagcggccatcgggcgacagagtcccctggccgctgaggctcagctgatgagagtcctgacggagagtcagcgccacggcgccgtccaccgtacagcggaaggtgccattaacctgggccagctccaggctgccgaccggagagtgcagtcgggcctgccgccactgcgcgcctccggcgatgatatgccggcagcgtccgtcgctgaaccgcccttcggtcaggctgaaggtgacctcccccgcggccttgacgggcatagtcgacatcaaccagcggctgagcaggctggcgggggcggtgagccgcccctcctgtaggcgcagatcgcgaaggccccacagccgggcctgacccatcacgccgcggggatcgctgagagagacctgccagcccgccagggtcagcgaccacgccagtcgttcaagccgttccccatgccagtagaccggttgcgccgcgccgcgccagacgctgccgctaaactgccccacctgtacgccgggcggcagcatgggggccagcaggcgcgccggagccgtggcggtgagccacaacagatagaggaccagcagcagtccgcccgcgatccagttagccttcatcgtcgcgctccagcagcagatggttgaccgtgacccagccgggtcgcgacggctgcccggtcacggacagcgagatcgcgttgacgccgcgcatcgccggagcgtccagccagtcgatcagcgcctggaaagcgcagtgctgaagggtgatctgcagacgttttccctgcggctgcaggcggatgaccgtcagtccgtggctcgccgcctcgcgcatcaccagcgcggtgagcgcctcttttgccgccggcgcgggctgctggctgagctgctgcaggcgcggagcctgctccgtcatccagcgcaggctggcctgctctttcaccagggtttgccgccactgcgcctcgcgggctcgccagggctgccacagcccataccagaaggcgcatgccgccagcagccctgtcagaccaagcaacaggcgctgctccgacggcgtgcgctgccgccaccagataagcagattagccatcgttttcctccagcgtcagttgtccctcaatgccatccggtttcgtgatcatgtcgcccggccggacgcgaaaccgcggctgcgcccgctgggtaaactgctccagcgcccgggaagagaccgcggcgatatccagctgcagacgattgcccgcggcatcccagctcagcgctcgcagacggatccccggcgtttcgctgaggatgttttgcaaggcgctgaggcggtcgacgaggggggcatgctgcgcctgacgggtgagggtttgcaggtgctgctgcatctgcagtcgtgggttaatcacctttttctccgtcggaaaccagcggtgatagaaggcccggctggcctgttgcgccgcctcggcctgacgcgccagatcgcgatggtccagcacgctgtttgcccctgccagtaacgccagagccagcgcggcataccgcgccggacgccagctcgcctgcgcagaccgccgccggacggcgaactccccctgcagcagactgagtttctgcgctgccggatggcgtgcggcaagggtcagcaatgtctgcgcaggctgctcccgccagacgcccggcgccgcgggcggcggcgaatagctgtcgatgacgtgctcttccgcctcgctctgcagcagctccgtcagccagacgttttccgccgccatgccgccccacggctggtggcggatcagccactgctcgtccacctgcaccgcgctccacgccggcggttgccagggcagggccagcacgtcgggcgtcaacgccaggggctgtaaggagagcgattcgcagcgcgccagccagtcgcgcattttttgccgctgtacggcgacgatctcgcactgggcctgctggcggtggagcagagcaaaatgggtggcttccacatcgtctgccagctgctcttccagcagaaacggggccacctgcagcggcggtttacgcaggcccgccggtagggtgagcgagtgaaacgcgcagtcgctggccgggatcagcacccaggccgggtactgctcagccagcgccgggaaagggctggcgtcgtcagtcggccaccggccgctggcctcgtggtgcggctcgccgggggcgaagagttgccagtgcagcggcgcctgcgcggcggcgaggcgcacgatcagcatggcctggggagaagcattaatcttgttcatcgaccaccatagagagtccatatcgccgctggacgacggtaaacgtgcgccccgattgttgcaggacgctgtgcagctgaaagcggagattgccggtcaccacggtaaaagcggcgataaagcgtgcgctgtgcaccgtcagccagggacgggcaagcgtggtatcggttttctgcagcgtcggctgcgcgagaaaggcggcgacgctgctccacccggttcgcgggcggttgtgcagcagctgttgcgcctcctgcagcgtcagatcgccgggaaagagggccaccagcagggcggcctgggaggggcgcagggtgttgacattgacctgcagcgcgtcatccggctggacgcagacgaaggggagcaggcgctgatagagcgcggcgtccatcccggccagcaggcgcaactcgctgacatcctgcatcggctggttggcggcgagatagcccggggtttgcgccatatagacctcgtcctccgccccgttcagccgcggctggccgtcgctgtccgtccagtcgccaagggcggcggcgatctggctggcgcgcagcggcggctcgccgagcagcgccagcagccgaacgaagacgttggtcgggtagggcgttccgtcgccagcctcatccgcgcgatggtcaatagcattgaggttgaagcaggcgtgcccgtcgcggatcgtggcgcggatttcgccatcgtcgagggtaaagcggcgcccctcctgcgcccaggtttgcgccaggttcgtttgactgggcgagtccagcgcatcgcgttgcagcagcgcggcggccatgttttccgccgccagggcgtaccatctggcctgcaaattatcgagggtcacggcggtatgctgatacatgaccgcggtgcgctcggtcatggcgctggcgaggatcatcatcagggcgaggatgaacagcaccatcaggagcgcgacgccgcgttgccgatttatcactggccgcctcccggggtgagtaaaaacaggcgggttatctccccgctgttcgccagcgtcagggtgatctccagcccctgcggcagcctctgcgggcggtcccaggtttcctgccagcgcccgtcggcgtaaaaccgcaggcgaaacgccgtgacctcgcgcagcagcacccggaccgtcggctggctgccggtcagcggatcctgctgatcgaagctcagacgctcaagccgctgctggcgcagacggtagctgacgttctggatctccgagcgcgggaggatccccagcgggtttggccagccgctgcggctgaaggccagtccccagtcgtcgctctgcaactggaaacgtccggcgaagaaaaacgtgtcgctgtttctggcgcgacggggaatgatgtgggtgacatcgtcggctatctggcgaaaggcgcgctggagggccgcgatctgctggcttttctcgcgggtcaggccatcggcgcggatgacgttctgcagcaccatcacggcggcggcgctgaggacggcgagaatagccagcgccagcagcgtttcaatcagggtgaaaccgcgcatcctggttatcatggcggcgtcacccaggtgcgcagggtggccagcggcgcgggatcgcttttttgccgccggacctccacgtccagcgcccgcagctgcggcagcgcggtttccactccctgccagcggacaaaccagcgcgtcccggcggcctccacggtggtttcagaccagctgagggcaggccagcgtttctccagccgcagctgcaccagctggttatccgccagccagctggcgaggattttctcttccatacgcccgagctggcgcgtctgctgcagggtggactgcatcaccgccaggccagcgagggcgaaaatcaccagcgcgaccatcacttcgataagcgtcattccggcttcacgcttcatggctgctcccgcgccgccagcggctggctgtcgccctgggcgtcgacgttgatgcccgtcgcggcgtcaattcgcagctgaaacggcgtgacttcaccgccgggaaaaataagcacgtcgggctgctcgcccggcgtccacgcctggccgtcgggaaagcgcagcgtcagcctggcccgcgggagggtttccgccgtggtgacgcgtccggcctgcagcggcagccactgcgcgttgccccaccggtcgtcagccgccgccggggcgctatcgtcggcaggctgcaggcgcataaactgccagcgctcagggtggatgataatgccgaagagctgaccggtttgctgcccgcgctcgcggacaaaatccagttgcgtctgaaagcgcgccaggatctgtgtggcctcctgggtgcgggcggagggaaacgccagcagcaccatgctggcgctgacgccgatcagcagcaggaccagcatcatctccaggagggtgaaaccgcgctgagacactatttcttcccgagggtccagttgccgatatcgtcattggtgtcgggcatcccgtccgggccgacgctgaagacgtcgatggcgccatgctgacccgggcttaacagctgatactcattcccccacgggtcctgcggcagacggcggatatagccgccttccgggtagttgcgggcatgcggctcggcggccggagcggtcaccagcgcctgcagtccctgttcggtgttggggtagcggctattgtcgagtttatacatgtccagcgctccctcgagcgccaccagatcgctgaccaccttctggcggtccgctttctccttgttgcccatcaggttaggcaccaccaggctggcgagaatgccgagaatgacgatcaccaccataatttccagtaacgtgaaaccgcgttgccgttgcatagttttctccattaatacagttacatactcataagggtgttcagttgcaggatcggctgcaggatggccagcacgataaacagcaccatgccggccatggtgaccaccagcagaggctcaaacaggctgagggccatctggatctgcgcgctcagctcccggtcctggttctccgccgcgcgctccagcatggcggtcagttcgccgctctgttcgccgctggcgatcatgtagcgcatcatcggcggaaacagggcggtggattccagcgcccgatgcagactgacgccttcgcgtaccgattcgctggccgccgccagctggctgcgcgcccaggcgttgctgaggacgtcggcgctgatgcgcatcgacagcagcagcggcaccgcgctggcattgagaatgcttaaggtgcgggcgtagcgcgcgctgttgacgctgcgggccacgcggccgatgaccggcaggcgcagcagcgcccggtcccaggcgagccgccgggcgggctggcgcagcagatagcgcagcgccagcagcgccagtaacgacagcagcgccagccaggggcccgcgctgcgcacgatgtcgctcaggctcattagcagccgggtagagaagggcagggcctgtttaagatggacaaactgctcaacgactttcggcaccacggtggagagcagaatggcgatcacgctgatagcgaccagcgtcagtacgatggggtagatcatcgcctgcagcaggcgggcgcggagctgctggcgctgctcggtatagtcagcaagccggttcagtacgccgtcgagatggccggaggtttcgccggccgccaccatggcgcagaacagcccgtcgaagcaggcgggatagccgcgcatcgcctccgccagcgagtggccttcgagcactttgctgcgcaccccggccattaacgttcttagcgacggcttttcgcactgctgggcgacggcatcgagcgccttttccagcgggatcccggcggcaaccagagtcgccagctggcgggtgagcagggctaaatcaccggtgctggtacgtcgggtaagggatccgccggcccacagtcgccgcgccgggtcggcagttgtcacttccagcgccagccagcccttgtcccgcagcagctggcgggcgtggcgggcggagtcggcctgctgaaggccgcgacgggttttgccctgcgcgtccagcgcctgatagcgaaacagggccatcttagacgctttccgtcgtttgctgttcggtgacccgcatcacctcctcccagctggtgatccccgccagcgctttgtcgcgtccggcatgacgcagggtttgccaggctggccccagctgctggatcagggtgatctcgttctcgccgcggtggatggcggcgcgcacgcgatcgtcgattagcagcagttcatggatcccggtacgcccacgatagccgatgaaattacactccggacagcctttgggctgccacagccgcgcgccgaccgggaccgccatctgccgggcggtgttggcatccgcctgccagggctgacggcagtgcgggcacagttggcgcaccagccgctgcgacatcaccgccagcagcgaggtagagagtaaaaaaggctccacgcccatatcctgtagacgggaaatggcgcccagcgcgctgttggtgtgcagggtcgacagcaccaggtgcccggtcagcgaggcctgaacggcgatctgggcggtttcgccatcgcggatttcgcccaccagcactacgtccggatcctggcgcaggatggcgcgcaggccgcgggcgaaggtcatctcgactttggcgttgacctgggtctggcctatgccctccagctcatactccaccggatcttcaatggtcatgatgttgcgctcccgggcgtcgaggcggctgagggcggcgtagagcgtcgtgcttttcccggagccggtcggaccggtgaccaggatgatgccgtgcgggcgggcgatcagcgcatcgacccgatcgagcagggcgggcggcatgcccagcgtcagcagatccaggttgacgctgtttttgtccagcagacgcaggacgacgcgttcgccgtggctggagggcagggtggagacgcgcacgtcgattgctcgcccgccgatgcgcagcgccatgcggccatcctgagggacccgcttttcggcaatgtccaggctggccatcaccttgatgcgcgaaattaacagggcggccagccgccgctgcgggcgcagaatttcccgcagcacgccgtcgacgcgaaagcggatctgcagatggcgctcgtaggtttcgatatgaatatccgaggctttctctttgatggcctcggtgagcatggcgttgatcaggcggatgatcggcgcgtcgtcctcgctgtcgagcagatcgtcggtgtccggcagctcttcggcgagggtatagaggtcgagctcgttgccgatgtcggccatcatgcggtgcgcctccgccgaatcacgctgatagctgagcaccagcactttctcgaacgcgtccggcgccagacggctgacgcgcatcgggccgtccgccaggcggcgcgcttccagcagcgcccgggcggcggtatcggggcggcacagcgcttcgcagcattcgccgtcgctgagcagcacaagatggtgcgcgcgggcccaggcgaagggcaacagcggacggcgttcggcggctggcgtcatgggcggcctccgagattgaaggcgtcaatggcggcgctgacctggcggaaggcctgggtctcctgctgcggatagatgtgcagcaggtcgttgctgagcgacgcttcgctgctttctttaccccgctgtttagtttgcgcattgttgaaggcggtgtactggccggaagaagcctggcggtactcatcgcgatcgcgaatgatggtcgggcggataaacagcatcaggttgcgtttcgacactttcttgctgtcggagcggaacagggcgccgatcaccgggatatccccgagcagcggcactttgtcagcggtatcggtgacggttttatccagcagcccgccaaccaccaccgtttcgccgctgccgaccagcacggcgttattcaccgtccgggtattgaaggtcgccccgagatcgctgctggtgctggaggccgagtcggcaacgctcgatacctcctgctcaatctccagcagcaccgcatcgccttcgttaatctgcggcttcaccttcagtttaatgccgacggttttgcgctcgacggtattgaagatgttgtcgcctgaggtggtttgcgagccggttaataccggaacttcctggccgacgttaaaggtggcttgcatgttatcgagggtgacgatgctgggggtggccagaatatcgttcttggtactgctggagagggcggtgagcagcatcgcccagttcccctgatagaagccggcggcgataccattaaacgagccgagggcgctggccagcgagctgctgatggtaccgtctttgttgtactggttggcgccggcgatagccgtcgatatcggcaaaccgctgttggtgaactgcgtcatgccggcgttcttgtttgcccactggataccgagattaaggccatcggcatcctgcacttcggcaataatcgcctccaccagcacctgcgggcggcggatatcgagctgggcgatcacccgctcaagatcgttcatcacgtccggcgccgcggtgacgatcagggcgttggtctggccgtgggctttgataataatatttttgtcgatcgcggccactggcctggcgctttgcttgtcgctctgcagcgagctgctgatcccggtcagaacctccaccagatcggcggctttggcgtacttcaggtagatcactttggtgttaccctgtaccgcctgctggcggtcgagctgtttgatcatggcgatgatgcgctggcgcgagtttggttcgccgctcaccagtaccgcgttggtgcgctcatcggccaccacgttcgccaccatcgagcccggcagcgccgacttgctggtatctttattaagctcggtaaccagtttgaccacttccgcggcggaggcccaggagaggggcacggtcaccacgctgcgatccccggcgttgtcgacgcgctcgacaatggtcagcaggcgtttgataaccgccgcgcggccggtcatcagcagtacgttggagggctcataatggaccacgctgccggcgccagcgttatcgttcagctggcggagcagcggggcgagatcgcgggcggcgacgttggtcaggggcaccacccgggtgaccacttcatcgccttcgcccggcgcggccgcgctggcgaccggcacggccgaggtcttggcgtctttggcgcggaccacttttagcacgccgttattcatattgatcacggcgaagccatatacatccagcacgctgaggaagaattgataatattgttcttcattgagcatatcgtaactgcgcacggtgatagtgccgcgtacgctgggatcgataatcaccgttttattcaggtttttgctgacggtattgataaattcctggatatcggtgcctttaaaactggcggaaaattcctccgcggcggccggagaaaatagcagcggggttaatatcagcagcgcaggcagcatttttcgcaggcgtttcatggttggcaattattcatcccccagcgcgaaagcaatatcgtgtcgttggccttcccgctcaacggttagcgttatttcggtcatgtcggccagattctgcagcgcctgttgcgcttgctcctggtcgcgtaaatcgatgccgtttaaggcaatcgccaaatcatttgcctgcaggccggactggcgaaacagcgaggcgtctttgcctgggtttagtcgataacccagcagtttgtcgccgctgagtaccggcgaaatagataaataagtgaggatattttgcggctgttcgcggagtcgcttcacgaggggcgggttgcccgcggcggtgggcggcggcgacggcgcgcggctgtcgttaaataataaaatggcctctttgcgcccctgatagttgacgatgatccggtcaggcagaatggcggcgatccgcgcatcataccctgggaggggatcgcccgtgctaaggctaacctgctgatttcccttttcgataatagcgatggagcgcgccgggttgctgctggcgagtagcccggccaggcgtagcttcaggctggaaaccggcacctgattgagactggcagcatccgttggcgtggggctatttttcaccgccaggccaaacagggtaaatgcgggccgcacattttttaattccggatctgccgccggaggcatggttaacggtagggcggaaatatcctcaggactcacagggaataccactcgccaggttaatttcgccagctgtgggatagcggttattaatatgatgagcgtcacaatttgtggtaataatttaattatccctttatttatatttgttaacctcatcacagaaactggcattttaattcctttgctaatttatttttctgcacgttggcgtaataccctaccgaaacaggtaggtgattattggcttttgaattatttattgccggagagtggcgataagcgtggcgaatcataatcagtttgcggtttcgggtcgtcattccctttattgatttactcccccggcttcctacgccccccgctcatttgtgggggatgattgcgcctgggaaagcaaaaatatctaattagcgcgctgtaaagatattcatcctttcttaccttttataatttaataagcatattagggactatcgaatgctcagatatacctgtcatgccctatttcttggatcgttagtattattgagtggctgtgataacagctcttcctcttctacctctggctcaccgggttcaccaggcaatcctggcaacccaggcactcccggcacgcccgacccgcaggatgtcgtcgtccgcttaccggacgttgccgtcccaggcgaagcggtgcaggcttccgccaggcaggctgtcattcatctcgtcgatatcgccggcatcaccagcagcacgccggccgactatgcgacgaaaaacctctacttatggaacaacgaaacctgtgacgcgctgagcgcgccggtggcggactggaatgatgtcagcaccacgccgaccggcagcgacaaatatggcccttactgggtgatcccgctgactaacgagagcggatgcatcaacgttatcgtccgcgatggcaccaataagcttatcgacagcgacctgcgcgtctctttcagtgatttcaccgatcggacggtatcggtcatcgccggcaacagtgcggtctatgactcccgcgccgacgccttccgcgccgcctttggcgtggcgctggccgatgcgcactgggtcgataagactactctgctgtggccgggtggggaaaataaacccattgtgcgcctctattacagccacagcagtaaggtggccgccgacagtaacggcgaatttagcgataaatatgtcaagctgacccccaccaccgtcagccagcaggtaagcatgcgcttcccgcatctcgccagctatccagcctttaaactgccggatgatgttaacgtcgatgaattgctgcagggcgagacggtggcgatagctgcggaaagcgatgggatcctgagctcagccacccaggtgcagaccgccggcgtgctggacgatacctatgccgccgccgccgaggcgctgagctatggcgcccagctaaccgatagcggcgtgaccttccgcgtctgggcgcccacggcgcagcaggtcgagctggtgatctatagcgcggacaagaaagtgatagccagtcacccgatgacccgcgacagcgcctccggcgcctggtcctggcaggggggaagcgacctgaagggcgccttctaccgctacgcgatgacggtctaccacccgcagtcgcgtaaagtcgagcagtacgaagtgaccgatccctacgcccacagtttgtcgaccaactcggagtacagccaggtggtcgatctcaacgacagcgcgctgaagccggaaggctgggacgggctgacgatgccgcacgcgcagaaaaccaaagccgatctggcgaaaatgacgattcacgaatcgcatattcgcgatctctccgcctgggatcaaaccgttcctgcggagctgcgcggtaagtatctggcgctcaccgcccaggaaagcaatatggtccagcatctgaaacagctgtcggcctcgggcgtgacccatattgagctgctgccggtcttcgatctggcgacggtcaatgagttcagcgacaaggtcgccgatattcagcagccgttcagccgcctgtgcgaggtcaatagcgcggtgaagagcagcgagttcgcgggctattgcgacagcggttcgacggtcgaagaggtgctgacccagctgaagcagaacgacagcaaggataacccgcaggtgcaggcgttgaatacgctggtggcgcagaccgactcctataactggggctatgatccgttccactacacggtgccggaaggatcctacgccaccgatccggaaggcacggcgcgcattaaagagttccgcaccatgattcaggcgatcaagcaggatctgggaatgaacgtcattatggacgtggtgtacaaccacaccaacgccgccggcccgaccgatcgcacctcggtactggataagatcgtcccctggtactaccagcgtctgaacgaaaccaccggcagcgtggaatcggctacctgttgctccgactcggcgccagagcaccggatgttcgccaagcttatcgccgattcactggcggtatggaccaccgattataagatcgatggcttccgcttcgacctgatgggctaccacccgaaagcgcagatcctctcggcctgggaacgcattaaagcgctgaacccggatatctacttctttggcgaaggctgggattccaaccagagcgatcgctttgaaattgcctcgcaaatcaatctcaaaggcaccgggatcggcacgttctccgatcgtctgcgcgacgccgtgcgcggcggcgggccgttcgactccggtgacgcattacgccagaaccagggcgtgggcagcggggccggcgttctgccgaatgagctgaccaccctgagcgacgatcaggcgcgtcacctcgccgatctgacccgtctcggcatggccggtaaccttgcggactttgtgctgatcgacaaagacggcgcggtgaagagaggcagcgagattgattataacggcgcgccaggcggctatgcggctgatccgacggaagtcgtgaactatgtgtcaaaacacgataaccagacgctgtgggacatgatcagctataaagccgctcaggaggcggatctcgatacccgcgtccggatgcaggcggtgtcgctggcgacggtgatgctcggccaggggatcgcctttgaccagcagggctcggagctgctgcgctctaaatcctttacccgcgattcgtatgattccggcgactggtttaaccgcgtggactactccctgcaggacaacaactacaacgtcggtatgccgcgcagcagcgatgatggcagcaactatgacattatcgcccgggtgaaagacgcggtggctactccgggtgaaacggagctcaagcagatgaccgcgttttatcaggagctgaccgcgctgcgtaaatcgtctccgctgtttaccctcggcgacggcgcgacggtgatgaagcgcgtggacttccgcaatactggcgccgatcagcagacgggtctgctggtgatgaccatcgatgacgggatgcaggctggcgccagtctggacagccgtgtcgacggcatcgtggtggcgatcaacgccgcgccggaaagccggacgctgcaggacttcgccggcacatcgctccagctgagcgctattcagcaggcggcgggcgatcggtcgctggcgagcggcgtgcaggttgccgctgacggttcggtcacgctgccggcctggtcggttgccgttctcgagttgccgcagggcgagtcgcagggcgctggcctgccggtgagcagtaaataacataacgtagggcgcccgtaagggcgcctctggctgatgacaaacctgtttcgttattgtgctcgcctttctgtcgggtggcggctttcgccttacccggcctacgaaagattacaatatcaaacagttatgcagttatctgtaggcccgcgcaagcgtagcgccgccgggcaattcctgaagattgcactttgtcagcagtctggggcatccgtaagggcgccttctcgttatcgtgagggaacaggagacggttgtgattgttcgtgatgacagtgaaagaggcatcccgccgctggtgacgcatcagccgccgtcctcgctggatgatgcgccggtgatccgcggacggatggtgcagatccccggctggattatcccgctgtacgccggattatttatcgcgctcggctggtttggcggcgagcagtggcgtcacccagcaccgccgcaaacgctgcccttgccggtggcgcatgcggcgcttctgccgttaaccgctgccggagaggccgcgccaaagacgccgccgccggcggcaaaagccagcgcgcccgcggcgccggaagtggacagcgatacgctgccgcctctgcgctacagcgcccatgtctacgcctcgcgaccggaaaagcgcagcattgtattaaacggcaaagcgtggacggagggcgattcacccctgccgaacctggtggtggagcaaatccagcaggatgtgacgatcttcagcttcaacggcacgacctttaccctcgcggcgctggaggactggccgggcggaaaaattgacgaggagccgaaagaggaataaaagcgcgcacaataaccggcgcgctgaggatatttcgcttagtcgctgcgcaagctggcaataaatggcgcgagctgacgattaaattgactgcactgtgtggcttccggggtactgtcctgtaaaagctgttggtaaagccggtcgctattttggcttaacgtcgccacgtcaatatttccccatccgcgcgctttaccgacattcaccgctgcccgatatatcgtttcatcggcggggagatcgctacgattacatttattcttgagatagcgcgccccggccgccacggacgagagctgctcgagctgcgcctggctgctgatagccgggctgagcgttgaggcgggtttttgttggcagccagacagaagggctaccatgcaaagcggaaatataagcggaatacgcatcatagagtaatcaaaataatgaatcactggccgctagtttaacaaatatttacctggtgtcatcataaaatattattctgcataaatgttaacaggctctcatttttatcaacggaaaggcgctaaatcgactttacttttatcaataataaacgttggcgctgggaaaatatattttcatctgcggatgatgccactgcgttgaccggcaggaagcgcgccgttttttatgttattaaaaaacatactctttcccatcttgttacgtgcgcagtaggtaaaatgctggttaagaatgtcgcattttagtgctatcctgtatgccctgaacattacgtgctatgttctgacttattctgccgatgatgcgtttaacacaatgattttatggtgaatttttattgttagtatcatgtaacatgaagcaaaccaaccctctgaaaggctggcggcgcgtcctgcctgccagcaggttgtcgtccgaaggataagcagcctggacgttaatttgagagatttcttcttcctctgaacaggggaagtattgagaatcaggcctttgcgcctgaacgttgcggagaaaaagcatggcgggagatgaccgcgagcctatcggacgtaagggaagaccctcacgtccgactaaacagaaagtcacccgtcgccgggtccgggaagaggactacgacgacgagtatgatgacgatgattatgaggatgagaaaccggtgccgagaaaagccaaaggcaaaggtggcaagcctcgtcggaagcgcagctggctgtggctgctggtcaagctggggattgtcttcgcggtgctgattgccgcctatggcgtctacctcgaccagaaaatccgcagccgcattgacggtaaagtctgggagctgccggccgcggtctatggccggatggtcaaccttgagccggacatgcagatcagcaaaaacgagatggtgcgtctgctcaacgccacgcagtatcgccaggtcagcgcgatgacgcgccccggcgaatataccgtgcaggctaacagcatcgagatgatccgtcgtccgttcgatttcccggacagtaaggaagggcaggtgcgcgcgcgtcttaccttcgacggcgaccatcttgagaccatcgagaatatggataataaccgccagttcggtttcttccgcctcgatccgcgtcttatcaccatgctgcagtcgccgaacggcgagcagcgcctgttcgtgaagcgcagcggcttccccgatctgctggtggataccctgctggcgaccgaagaccgccacttctatgagcacgatgggatcagtctctactccatcggccgcgcggtgctggcgaacctgacggcaggccgaacggtgcagggggcgagtaccctgacccaacagctggtgaaaaacctgttcctctccagcgaacgctcctactggcgtaaagccaacgaagcgtatatggcgctgatcgtcgacgcccgctacagcaaggatcgcatccttgagctgtatatgaacgaggtgtacctcggccagagcggcgataacgaaattcgcggcttcccgctggccagcctgtattacttcggccgtccggtggaagagctgagcctcgaccagcaggcgctgctggtggggatggtgaaaggggcgtcggtctataacccgtggcgtaacccgaaactggcccttgaacgacgcaatctggtgctgcgtctgctgcagcagcagcaggttatcgaccaggagctgtacgacatgctcagcgcccgtccgctgggcgtgcagccgcgcggtggggtgatttcaccgcagccggcgtttatgcagatggttcgtcaggaactgcaggcgaagctgggcgataaagtgaaagatctctccggcgtgaagatcttcaccactttcgactcggtggcgcaggatgcggcggaaaaagcggcctccgaagggatcccggttctgaagaaacagcgtaagctggcagacctggaaaccgccatggtggtggttgaccgcttcaccggcgaagtgcgggcgatggtcggcggcgcggagccgcagttcgccggttataaccgcgcgatgcaggcccgccgatcgattggttctctggccaagccggcgacctatctgaccgcgctgagccagccgaatcagtatcgcctgaatacctggatcgccgatgcgccggtgacgattcgcctgtccaacggtcagacgtggtccccgcagaacgacgatcgtcgtttcagcggtcaggtgatgctggtcgatgccctgactcgctcaatgaacgtcccgacggttaacctcgggatggcgctgggcttgccggcggtagtcgatacctggactaaactgggggcgccgaagaatcagctcaacgcggtgccgtcgatgctgcttggcgcgctgaacctgacaccgattgaagtggcccaggccttccagaccatcgccagcggtgggaaccgtgcgccgctttccgcgctgcggtcagtgattgccgaagatggcactgtgctctaccagagctatccgcaggcggagcgcgcggtgcctgcccaggcggcctacatgacgctgtggactatgcagcaggtggtgcagcgcggtacggggcgtcagctgggggcgaagtatccgggcctgcatctggcggggaaaaccgggaccaccaacaataacgtcgatacctggttcgccggcatcgacggtagtcaggtgaccatcacctgggtggggcgcgacaataaccagccgaccaaactgtacggtgccagcggcgcgatgtcgatttaccagcgctatctggcgaaccagacgccaacgccgctggtgctgacggtgccggaagacgtggttgatatgggcgtggacagcaacggcaacttcgtctgcagcggtggtatgcgttcgctgccggtctggaccacgcagccggatgcgctgtgccgtcagggcgaaatgatgcaacagcagcagttgcagcaacaggaagcgaaaaatccgtttaatcagtccgggcagcagcagcagcagcaacagcagcaacagcagcaacagcagcaacagccgccgaagcagcaggaaaagagcgacggcgtcgcgggctggatcaaggatatgttcggcaataactgattttgaccgcacgaccaggccccttaatacgaaagtattaaggggtttttttatgcctgtaaaaaagttaacggctctttaactccataataactatctggttattaattcagccttcgaccggcggcgacaggcatatcgcttgccttgccttcgacgtttcgcctattatatcgcccgtcataataataattctcgtttacgttatcattcactttcatcagagatatacccatggcgcgtccaaaaactgctcagccaaatcactcgctgcgtaaagtcgcagctgtagtagccacggcggttagcggcatgtctgtctacgcacaggcagcagaacaaccgaagcaagaagaaaccatcaccgtcgttgccgccccggccgcccaggaaagcgcctggggaccggcgccgactatcgcggcaaaacgctccgccacggcgaccaaaaccgataccccgattgaaaaaacgccgcagtctgtgtcggtggtgacgcgccaggagatggagatgcgccagccgacgacggtaaaagaggcgctctcctatacgccaagcgtcttctctactcgcggcagttcgaccacttatgacgtggtcaccattcgcggcttcaccacctcgacgaccgtcaacaccaaccagtatctggacggcatgaagctgcaggggaataactactctgaagtctccatggatccttactttctcgagcgtgtggaagtgatgcgcgggccaacctcggtgctgtacggcaacagcaacccgggcggtatcgtcagcatggtcagcaagcgcccgactaccgagccgctgaaagaagtgcagtttaagatgggcaccgacaatctgtggcagaccgggtttgactttagcgacgccattgatgatgccggcgtttggtcgtatcgcctgaccggcctgggccgcagtcaggatgcccagcagcagatggcgaaatcgactcgctacgcggtggcgccctcctttagctggcgtccggacgataaaaccgacttcaccttcctgagcaacttccagaatgacccggatgcgggctactacggctggctgccgcgcgaaggcaccgtggtgccgtattacgacgccaacggtaaggcgcacaagctgccgaccgatttcaacgaaggcgagtccgataataaaatctcccgccgccagaagatggtgggctacagcttctcccatcagttcgatgacacctttaccgtgcggcagaacctgcgctatgccgatgtgcatacgctctatcgttccgtatacggcaacggctatgtcgcgccgggctacatgaatcgcgcctacgtgcgctccgacgagcacctgaacaccttcaccgtcgatacccagctgcagtctgatttcgccaccggcgcggtcagccatacgctgctgaccggcgtggactactcgcggatgcgtaacgatgtggatgccgactacgggacggcggatcctatcagcatgagcaatccgcagtacggcaatccgaatattcaggtcaccttcccgtacgcggtcctcaaccggatggagcagaccggcctgtacgcgcaggatcagatggagtgggataaatgggtgatgaccctgggcggccgttacgattacgccacgacctcaacgttaacccgcgccaccaacagcctggcggagaatcacgaccagcagttcagctggcgcggcggcatcaactacctgttcgataacggcatctctccgtacttcagctacagcgaatcgtttgaaccggtatcgggttccaacagccgcggccagccgttcgatccgtcgcgcggtaagcagtatgaagccggcgtgaaatacgtgccgaaagatatgccggtggtggtcaccgcggcggtctatcagctgaccaaagacaagaacctgacggctgatccggctaaccaggcgttcagcatccagaccggcgagatccgctcccgcggccttgagctggaggcgaaggcggcggtgaacgccaatattaacgtcaccgcagcctacagctacaccgatgcggaatacactcacgatacggtgttcaacggcaaacgtccggcggaagtgccgcgtaacatggcctccctgtgggcggattataccttccacgaaaccgcgctgagcggtctgacgattggggccggggcgcgctatatcggttcaacggtcagctactacaaaaatgacaccagcaccggtaagaaaaatgatgcctttagtgtggccggttatgcgctgatggatgcgacggtgaaatacgatctggcgcgctttggcctgccgggatcgtcggtcggcgtcaacgtcaacaacctgttcgaccgcgaatatgtctccagttgctacagcgaatacgcctgctactggggcgccggacgtcaggtcgtcgccaccgccaccttccgtttctaaccacctacgggcgcggttcgccgcgccctctatcaggttatcgctatgcaggaacagactccgcacgcagaaaccaccttcgcgctggatcgcgtcactttccgtgtgcctggccgcacattgctccatccgctctcgctcaccttcccgaccggaaaagtcacaggcctgatcggccataatggctccggcaaatcgacgttactgaaaatgcttggccgtcatcagccgccctccgcaggcgaagtgctgctggacgggcagccgctggagagctggggcagcaaagcctttgcccgcaaagtggcctatctgccgcagcagctgccgccggccgaaggtatgacggtgcgcgagctggtggcgatcggccgctatccatggcacggcgcgctgggtcgctttggcgcagcggaccgtgagaaagtagaagaggcgattgcgctggtggggctgaagccgctcgctcatcgtctggtggacagcctctccggcggtgaacgccagcgggcgtggatcgccatgctggtggcgcaggacagtcgctgcctgctgctcgatgaacccacctcggcgctggatattgctcatcaagtcgatgttctggcgctggtgcatcgtctcagccagcagcgcggcctgacggtgatcgccgtcctgcacgatattaatatggcggcccgctattgcgactatctggtggccctgcgcggcggagaaatgattgctcaggggacgccggcggaactgatgcgcagcgacactctggaacagatctatggcatcccgatggggatcctgccacacccggccggtgcggcgccggtaagctttgtctattgatgatgaacccaactctgataacccgacgccgcctgctgatcgcgatggcgctctcgccgctgctgtggcagatgcgcggcgcgcaggcggccgacgtcgacccgcagcgcgtggtcgccctggagtggctgcccgcggagctgctgctggcgctcggcgtgacgccctatggcgtggccgatattcccaactatcgcttgtgggtgaacgaacccgcgctgcccgactcggtgatcgatgttggtctgcgtaccgaacccaaccttgaactgctgacgcagatgaaaccgtcgtttatcgtctggtcggcgggctacggcccgtcgccggagaagctggcgcgtatcgcgcccggccgcggtttcaccttcagcgacggcaaacggccgctggcgatggcccagcgttcgctactggaaatggccgatctgctgggcaaaacgcagcaggcgaagcgccatctggcggagttcgacgcgctgatggagagcctgcgtccgcgttttgccgggcgcggcgatcgtccgttgctgatgatctctctgctcgatccccgccacgtgctggtgtttggcgaaaactgcctgttccaggaggtgcttgatcgctttggtattaaaaacgcctggcacggcgaagcggcattctggggaagcgttagcgttggcatcgacaggctggcggcatttaacgaagccgatgtcatctgtttcgaccatggcaatgagcgagatatggctcaactgctggcgacgccgctatggcaggcgatgcccttcgtgcgcgcgggccgcttccagcgcgttccggcggtttggttctacggcgcgacgctgtcagcgatgcattttgcccgcgtgctggctgatgcccaggggagtccggcatgaatacgcgtctctcgccgttagctattatcctgctggccgggctgctgggcgtcgccttcgcgctgagcatcgtcaacctcaatgtcgccttgccctatgcgcagtggcggcaggcgctatggcagccggatgtcgatgatattgcccaaatgctgtttcattacagtttgttaccgagactggctgttgcgctgctggtgggcgccgggctgggactggttggcgtcctgttccagcaggtgctgcgtaatccgctggcggaaccgaccacccttggcgtcgccaccggcgcgcagctggggataacggtcaccacgttatgggctattcccggcgtgctggcgtcgcaattcgccgcgctggccggggcctgtctggtgggcgcgctggtgtttggcgtctcgtggggcaagcgcctgtcgccggtaacgctgatcctggcggggctggtggtcagcctttactgtggcgcgcttaaccagctgatggtgattttccatcacgaccagctgcaaagcatgttcctgtggagcaccgggacgctgacgcagaccgactggagcgtggcgcagcgcctgtggccgcagctgcttggcggggcaatactcaccttgctgctgctgcggccgctgaccctgatggggctcgatgacggggtggcgcgtaacctcgggctggcgctgtccctggcgcgcctcggcgccctgacgctggcgatcgtcatcagcgcgctgctggtgaacgcggtagggattatcggctttatcggcctgttcgcgccgctgctggcgaaaatgcttggcgcccgtcggctgctggcgcggctgctgctggcggcgctgatcggcgcgctgctcctgtggctttccgatcaggtgatcctctggctgagccgggtatggcgggaagtctccaccggctcggtcaccgccctgattggcgcgccgctgctgctgtggctgctgccgcggttgcgcagcatcagcgccccggtgatgaacggcggcgataatgtgcagcctgagcgctatcatgtgcaatggtttgttctcgcaggcgtcgcgttgctgctgctggcggtgagcgtggcgctggcctttggtcgcgatgcccccggctggctgtgggcccacggcgatctgctggagcaactgctgccctggcgctggccgcgggtgctgtcggccctgttcgccggggtcatgctggcggtcgccggctgtattatccagcgcctgaccggcaacccgatggccagcccggaagtgctgggcatcagctccggcgcggcttttggcgtggtgctgatgctgttcttcgtgcctggcgacgcctttggctggctgctgccggccggcagccttggcgcggcggccaccttgctgatcattatgctcgccgccgggcgcggcggcttctcgccgcatcggatgctgctggcggggatggcgctgagcaccgccttcactatgctgctgatgatgctgcaggccagcggcgatccgcgtatggcgcagatcctgacgtggatctcggggtcgacatatagcgcgacgccggagagggtggtgcgtagcggcgcggtaatgctggcgctgctggcgctggcgccgctctgtcgtcgctggttaaccatcctgccgctgggcggggaggcggcgcgagcggtgggcatggcgctgacgtcatcgcggattgttctgctgctgctggcggcctgcctgacggcggcggcgacgctgaccatcggcccgctgagctttgtcgggctgatggcgccgcatatcgcgcggatgatgggcttccggcgaaccctaccgcatatggtgatttcagggctgactggcgggctgctgctggtcttcgccgactggtgcggacggatgatgatgttcccgtatcagatcccggcggggctactgtcgacctttatcggcgcgccttactttatttatttgctgagaaagcagagtcgctaacggtcctggatggcttcaacatccccggtggcgctatcgcttaccggggctacagcgctgtgcgatttggtagcccggataaggcgcaatgcgcctcctccgggaaaatccctgcgccaccaggcattcaagcaccttacagcttggcaaatacccgacgcgcggcgtcgatggtgttgtcgatatcttcttcgctgtgggccacggacataaagccggcctcaaacgctgacggcgcgaggtacacgccttcctccagcatcagatggaagaagcgcttgaagcgttcaacgtcgcacttcaccacgtcctgatagcaggtgacggtttcggcatcggtaaagaagatgccgaacatgccgccgacgttattgaccaccagcgggatcccggcgtcacgtgccgcatccagcaggccttgcgccagctggttagtcagttcagtcagggtttcatggacccccggctgcgccacttcgttcaggcaggcgaagccagccgccatggcgatcgggttgccggagagggtgcccgcctgatagaccggaccggtgggagccagggcgtccatcacctcacggcggccgccgaaggcgcctaccggcatcccgccaccgatgattttccccagacaggtcagatccggctccacgccgtagtaagcctgagcgcctgccagcgccacgcggaagccggtcatcacttcgtcgataatcagcagggcgccaaattcgtcgcacagcgcgcgcaggcccggcaggaattccggctgcggcggaatgcagttcatatttccggccaccggctcgacgatgatgcaggcgatctcctgcggatactgctcgaacgccgcgcgcaccgaggcgaggtcgttataagtgcaggtcagggtatgtttggcgaaatcggccgggacgcccggcgagttcggctggccgagggtcaacgcgccggaaccggctttcaccagcaggcagtcggcatggccgtggtagcagccttcgaacttaatgattttgtcgcgaccggtgaagccgcgcgccaggcgaatggcgctcatggtggcttcggtaccggagttcaccatccgcaccatatccatggtcggcaccagctcggtcaccagggccgccattttcacttccatttcggtcggcgcgccaaagctcaggccgcgggatgccgcctcgatcaccgcattgcggatagccgggtggttgtggcccagcaccatcggaccccaggaaccgacataatcgatataggctttcccatccacgtcatagaggtaagcgccatccgcgcgttcgataaacagcggtgtgccgccgacgccggtgaaagcgcgcaccggcgagttaacgccgccggggatcagttcgcgcgcagcgtggtacagattttcagatttgctcatggccagggtcctggttcgtgaaaaatgttttatcggctattctaagttattccaggatggttatgaaagttttgcccaattgaaacaatgtgccgcaagggcatttttttgacgacgcagcgcgccgggacggctaaaatgccgctctcttcatttgtattaccaataattgataacggcatgaaagcagaaactccctcttttgaagcacatcagtttgtgcgggtgcgtcgcggcgatgcggtgcgccgtctgattcaacgcgataaaacgccgctggcggtgctgtttatggcggcagtggtcggcacgctggcggggctggtgggcgtcgcctttgaaaagagcgtgaactgggtgcagaaccagcggatcggcgcgctggcgcaggtggcggaccactggtatctggtctggccgctggcgtttatcctgtcggcgctgctggcgatggtcggctattttctggtgcgtcgctttgcgccggaggccggcggctccgggattccggaaattgagggcgcgctggaggagctgcggccggtgcgctggtggcgcgtgctgccggtgaaattcgttggcggcatggggacccttggcgccgggatggtgctgggtcgtgaaggaccgatggtacagcttggcggcaacattgggcgcatggtgctggacgttttccgcatgcgcagtccggaagcgcggcatacgctgttggcgaccggtgcggcgtcggggctttcggcggcctttaatgcgccgctggccggtattctgtttatcatcgaagagatgcgcccgcagttccgctacaacctgatctccattaaagcggtgtttaccggcgtgatcatgtcgagcattgtgtttcgcattttcaacggcgaagcggcgatcattgaggtgggtaaactaagcaacgccccggtaaataccctatggctgtatctggtgctgggcatgctgtttggctgctttggcccgctgtttaattttctggtgctgcgcactcaggatctgttccagcgcatccacggcggcaacatcaaaaaatgggtgttgattggcggattaatcggcgggctctgcggtctgctggggctgatgcagccctccgcggtgggcggtggctttaacttgatccctatcgccgctgccggtaacttctccgtcggactgctgctgtttatctttattgcccgcgtggtgaccacgctgatctgcttctcttccggcgcgccagggggcattttcgcgcctatgttggcgctcggcacgctgctgggcacggcgttcggcatggcggctattccgctgtttccggcctaccatctcgatgccggcaccttcgcgattgccggtatgggggcgctgctcgccgcctcggtgcgtgcgccgctgaccgggatcgtgctggtgctggagatgaccgataactatcagctcattttgccaatgattattacctgccttggcgcaacactactggcgcaattcctcggcggtaagcctttgtattcgaccattctgcagcgtactctggcgaagcaggaagccgagcaggcggcaaaagcgcagcaggctccccgggagaatacttgaacgatttaccagggtattagataatggctcaaaaggtccggttattctttaaccggccggaagtatcaatgggagcagaaaatgagtgatgacgtagcgttgccgctggagtttaccgaagccgcagccaataaagtaaaacacctgattgcggatgaagataatccgaacctgaaactgcgcgtgtatatcaccggcggcggttgcagcggtttccagtatggcttcacctttgacgatcaggtgaacgaaggggatatgaccattgagaaacagggcgtcggcctggtggttgacccgatgagcctgcagtatctggtcggcggctctgtcgactataccgaagggctggaaggttcgcgctttatcgtgaccaatccgaacgcgaaaagcacctgcggctgcggctcctcgttcagcgtttaaagcgagttctcccccagcgggagggagcaaaccctaaaaacggtaaccttaaggttaccgttttgcttttattaccgaccgttatcgtccagggcaaacgtcggcagcttcagatgccagcgaatagccgccagacgaattaccagggtgaccaccatccccatcattgccgaattctccagcgggagatgaaaggtgtcgtgtgccgtggcgtggacaataccgccgacgatacaggcggtggcgtagatttcggtacgcagaatcataggaatttcccgcgccagcacgtcgcgaataatcccgccgccgacgccggtcaccacccccatgcacaccgcgaccagcgggccgctgccagcgagaaaagctttattgacgccaatgccgacaaacaccgccagaccgacggcatcaagaacgggcaggatccatttcggcagccggcgaggctggcggaccagcaggatggtcagcatgctggtgaccatcgccaccaccagatcggtgggatctttgacccagaataccgggccattcgccagcgccatgtcgcggatggtcccgccgcctaccgccgtcactacccctaacaccagcacgccgaatgggtccatacgcagttttccggccagcagtacgccggagatcgcgaagacagctgtgccaataatatccagccaatagacaagcatcgttgattcccactgaacatccggtgtgccggatgattattttacctggtcaagcgccgcacaaagttgtttggcggcgaggataatacgtgggccggcgcgttcaaaccagtcgctgtgtaacgcaatcaacgaaatggtgagctgatgttgccaaaagcgctgcgcttcggcaatgcggctggcatccccggtcacaacgatcgcctgcggctggcgggccagcacctgttcgcggctcacctgcggccagggaacgcggctggtggcgaagatattctcgccgccgcaaagccttagcacctgatcctgaatcgaaccggggccgctggtgaacagcggtgcggagccgaactgcaggaagacgcgtttcttcggcgcgttggcatagcgcgctttcaacgcatcgtactcctgctgcatcgcctgcgccgcctgctgtgctttttccggctgcgggctccactgcgccagctcacgcagggtagcgatgatctcttctatggtcgaggtctgtacccacaggacgtgaatacccagagactgcagctggttaacctggcgttcggcattgcccccgcgccaggccagcaccacgtctggcttgagcgccacgatgcgttccaggttcattccctgccagctggcaacctgttcgatcgttttggcctgcgaaggataatcggaatagctgctgacgccgaccggcgtgatcccggcggcaaaggccagttcggtattggcgggggagagggtgatcacccgcggcgcggccagcagccacgccggggcgagtaacagcagcgcggcaagcgcgaaggatagcgacttagccacgtgccaggttctgtaccagattctccaccatcagggtggactgtctggcggcgaccgcaaggaactcctcaaagctgaggtgggactgctggtcggccacgtcggagatagcgcgaaccaccacgaagggaaccttaaagttatggcagacgtgggcgatggcggtcgcttccatttccacggcgatcgcctgcgggaaattatggcggatcttcgccagaccgacagagccgttaatgaaggcatccccgctaacgatgaggccgcgaacggcgttgagatctaacgctttaatgcagctctctgcggcggccaccagtttttcatccgccttaaaacccgccgggcagccagggagctggccgtattcatagccgaaggcggtgacgtcggcgtcgtggtaacgcgcttcatcggagacgacgatatcgccgaccttcagcgtcgacgccaggccgccggcagaaccggtattaatgatcacgtcaggctggcagcgctccagcagcagggtcgcgcccatcgccgccgctacttttccgataccagacttcagcagagcgacgtcaacgccgtgaagttggccggtatagatttcgcttccgccaatggtgatggtctggcggttttcgattttgtcgcgcagaagggtaacttcctcttccatagcgccaataatgccaattttcatagatttactcgcgatgtgtcaggtttagttgcatagtctatcatgcgcttaaggggaagcgtattgctcgcgcgggagaggctatggcaaagattgattttcgcaacaagataaactggcgtcgacgcttccgttcgccgccgcgggtggagacggagcgcgacatcctgcggatctttgaaagcgatcggggacggatcgtcaactcgcctgcaatccgccgcctgcagcaaaaaactcaggtcttcccgctcgagcgcaacgcggcggtgcgcactcgcctgacccactcgctggaggtgcagcaggtggggcgctatatcgccaaagaggtgctgagccggctgaaagagctgaggctgctggaagagtatggcctggaagagctgaccgggccattcgagagcgtggtggagatggcctgcctgatgcacgatatcggcaatcccccgtttggccattttggcgaagcggcgattaacgactggttccgtcagcgcctggcgcccggcgatgcgctcgggcagccgctgaccgacgatcgctgcgaagtgcaggccttacgcctgcatgacggagagacatcgcttaatgcgctgcgccgtaaagtgcgccaggatctctgcagctttgagggcaacgcgcagggcattcgtctggtccatacgctaatgcgtatgaacctgacctgggcgcaggtgggatgtatcctgaaatatactcgtccggcgtggtggtctgaggagacgccggccagccacagttatttaatgaagaaacctggctattatttagccgaagaagagtatgtcgcgcgtttgcgtaaagaactggatctcgcgccttacaatcggtttccattaacctggattatggaggctgcggatgacatctcatattgcgtcgcggatctcgaggacgcggtggaaaaacgtatttttagcgcagaacagctctatcagcatctttacgacgcctggggcagtcatgaaaaaggctcgttattttcgcaggtagtagaaaatgcctgggagaaatcgcgagccaattatctgaagcagagcgcggaagatcagttttttatgtatttgcgggtgaatacgctgaataagctggtgccctacgcggcgcgccgatttattgacaacctgccggcaatcttcacgggggactttaatcatgcgttgctggaggacgacagcgattgcagtcagctactggagctctataaaaatgtggcgatgaaacaggtctttagccatccggatgttgagcagctggaattgcagggctaccgggtgatcagcggcctgttggatatctatcagccgctgctgaaattatcgctggaggatttcagcgaattagtagcgcaggagcgggtacgacgtttacccattgcctcccggctgtatcagaaactttcgacccgtcaccggctggcctatgttgaagcggtaaataaactggcgcgtacggcgcccgaatttgcgctgatggaatactattatcgctgccgtctgattcaggactatatcagcgggatgacggatttgtatgcgtgggatgaatatcggcgactcatggcggtggaataggctggagttttgtaaagatggacaataaatttttactttttccagaaacttaattccggaacttagcgttataaaatgactctgatagtcacgtacacagcaactttcgttacctgatattgagattgaaactgatgaaaaaaaccacgttagcaatgagtgcactggctctgagtttaggtctggcgttgtccccgctctctgcgagcgcggcagaaacggcatcttcggccactaatgcacagcagatgccaagcctggccccgatgctggagaaggtgatgccgtcggtggtgagcattaacgttgaaggtagcaccaccgttaatactccacggatgccacgcaacttccagcagttctttggcgataattcgccgttctgccaggatggttctcctttccagagttcaccgttttgccagggcggcggacagggcggtcagcctgacggcggccagcagcagaaatttatggcgctgggctccggcgtcatcattgatgccgccaaagggtatgtggtgaccaacaaccacgtcgtggacaacgccaccacgattaaggttcagctgagcgatggccgtaggtttgatgctaaagtcgtcggcaaagatccgcgctctgatatcgcgctgattcagattcaggagccaaaaaacctgacggcgattaagcttgccgactccgatgcgctgcgcgtcggtgattacaccgtggctatcggcaacccgttcggtctgggcgaaaccgtgacctccgggattgtctccgcgctgggccgtagcggcctcaacgtagaaaactacgaaaactttatccagaccgatgcggcgattaaccgcgggaactccggcggtgcgctggtgaacctcaacggcgagctgatcggtatcaacaccgccattctggcgccggacggcggcaacatcggtatcggttttgctatcccgagcaacatggtgaaaaacctgaccgagcagatggtgaaatatggccaggtgaaacgcggtgagctcggcattatgggcaccgaactgaactctgagctggcgaaagcgatgaaagtcgatgcccagcgcggggccttcgtcagccaggtaatgccaggttcggcggccgcgaaagcgggcattaaagccggcgatgtcatcacctccctcaacgggaaagcgatcagcagcttcgccgcgttgcgtgcccaggtcggcaccatgcctatcggcagcaaagttgagcttggtctgctgcgcgacggcaaaccggtgaccgtgaccgtcgaactgcagcagagcaaccagacccaggttgactccagcactatcttcaacgggattgaaggggcggaaatgagcaataagggtcaggataagggcgtggtggtcaataatgtgaaagccggtaccccggcggcacagattggcctcaagaaaggcgacgtcatcgtcggggcgaatcagcagccggtgaaaaacatcgccgatctgcggaaaatcttcgacgccaaaccgtccgtactggcgctgaacattcagcgcggcgacgcctctatctatctgctgttgcagtaaccgccagcgctcgcttcccaagccccttccctcgccgagggcaggggcttttttcgttctgtgaccgcccccacaactccacatatctcaccccggcttagtgcaaatgcacaatgcagcgcgacgatgactcttttatgctggtgcccagcaaaggggaggactacatggctggctggcatcttgataccaaaatggcgcaggatattgtggcgcggaccatgcgcatcatcgataccaatatcaacgtgatggatgcccgcgggcggatcatcggcagcggcgatcgggaaaggattggtgaattgcacgaaggcgcgctgctggtcctctcccaggggcgggtggtggatatcgacgacgcggtcgctcgccatctgcacggggttcgccaggggattaacctgccgctgcgcctggagggggagatcgtcggggtgatcggcctgaccggcgagccggagtcgctgcgaaaatatggcgagctggtgtgcatgacagcagagatgatgctggagcagtcgcggctgatgcatctcctggcccaggacagccgtctgcgcgaagagctggtgatgaacctgattcaggcggaagagcataccccggcgctgaacgaatgggctcagcgtttaggcatcgatctcaatcagccgcgcgtggtggcgatgattgaggtagacagcggtcagctcggcgtggacagcgcgatggcggaactgcaacagttacagaacgcgctgaccacccctgatcgcaataatctggtggccattgtctcgctcacggaaatggtggtgctgaaaccggcgctgaacagctttggccgctgggacgctgacgatcacgtccggcgcgtcgagcagcttatcgccaggatgaaagagaatggccagctgcgctttcgcgtagcgctgggcaacttcttcaccggcccaggaagtatcgcccgctcttaccgtaccgcacggacgacgatgatggttggcaagcagcggatgccggagagccgcagttatttctatcaggatctgatgctgccggtgctgctcgacagcctgcgcggcggctggcaggccaatgagctggcccgtccgctggcgcgtttgaaggccatggacaacaacgggctgctgcggcggacgctgcaggcgtggtttcgccataacgtgcagccgctggcgacgtcaaaggcgctgtttattcatcgcaatacgctggagtaccggttgaaccgtatctcggagctgaccggcctggatctcggtagctttgacgacaggctgctgctgtatatcgcgctgcagctggatgaacaacgctaagacgtggaggcaaaaaaatgccgggcagcgacgcgccatacccggcctggacgatgcatgctgtctggagtggatagagaccaccagcccggccaggcaacgcgccgccgggatgctcttacttacgggtgagcttttccagatcggcttcgatttcgctgatcttattagtgaccacgctttccagatggcgtaaatcgtcgaggattttacgcttgagatcgatttcagtgcgatcgcgctggcagatctgatccagctcgtcgataacgtagcgcagattggggctgatctcctggacctctttgtagccctggccgacgccgtcggcgacgacggttttgcgctgacgcggatatttgaacttcacgctcttggcgaagaattcgcctttgtctttctgaaaatagattttcagaatgtcgttgttagcttcctgccgcaggctatagcgatcgatctcatcagggttggtaatgccaagacttttcagattatcgtacataacggtacctttgatagcatcataaccattgaataattaacgaaaaaatccattttcgccagcatcaaatataaaaaaagcgggatatctcccgctttttatttgctttagtcgatggtgcgcagcagctcgttaatgccgaccttgccgcgggttttggcatcgactttcttcacaatcaccgcgcagtacaggctgtatttaccatctttcgacggcaggttgcctgagaccaccaccgagccagccggtacgcggccgtagaagacttcgccggtttcgcgatcgtagattttggtgctctgaccgaggtaaacgcccatggagatgacggagccttcttcgacaatcaccccttcaaccacttcagagcgcgcgccgatgaagcagttatcttcgatgatggtcgggttcgcctgcagcggctccagtacgccaccgatgccgacaccgccggacagatgcacgtttttaccgatctgtgcgcaggagccgacggtggcccaggtatcaaccatggtgccttcgtcaacgtaggcgccgatgttaacgtaggacggcatcagcacagtgttgcgggcgatgaacgcgccctggcgcacggcggccggcggtaccacgcggaaaccttctttctggaaacgcgcttcgtcgtagtcagcgaatttcatcggcactttatcgaagtagcggctttccgcaccatcgataacctggttatcgttaatacggaaagagagcagtaccgccttcttcagccactgatgcgtcacccactgaccgtcgatcttctcagcgacgcgcagcgcgccggaatcaagaagggcgataacctggttaaccgcttcgcgggtcacggtatccacattagccggcgtaatgtcggcgcgacgctcgaaagcggactcaataacgttctgtaactgctgcattgtttctttccattcactaaaaaaaatacgtcaccctttatcgtttggattgagggccgctgtcaaccgttgttgcacttcttgttgcagctcattattaagggcacgccggtcggcggtggcgattataaataaatcttctactcgctcaccaattgtcgtaattcgcgccccgtgaagcgatatcccgaggtcggcgaacacctgcccgacgcgggcgagcagcccgggctggtcgagcgctatcagctccagaaacgattttcggtcggtatgggtcggcaggaaattcacctcggtgtccacggaaaaatggcgtagctttgccgcctgacgacgcggggccggaggctgccagctgcgctgagtgatggtctgctccagcccctggcggatcgcctcgtggcggtcggcggaaagggggctgccgtcgggctcaagaacgataaaggtatccatcgccataccgtcgcgggtggtgaagatctgcgcgtcgtggacgctgaggttgcgacggtcaagttcgccacacaccgcggcgaacaggtaagggcgatccgggctccagataaaaatctccgtaccaccgcgggtagcctgcgagctcagcaggatcatcggtttattcagatcgtggctcagcaggttgcgggcgtgccaggcgagctgcgtcggcgtatgtcgcacgaaatagttggcgcggcagcggttccagatctgatgcagcgcctcttcattaatattgtccatccgcagcagggccagcgcctgcagctgatggtgacgcactcgttcgcgcatgtccggggtgctttgcatgccgcgacgcagctgcttctcggtggcgaaatagagttcacgcagcaggctctgcttccagctgttccacaaggtttcgttggtggcgcagatatcggcgacggtcagacacaccagatagcgcagacgattttccgtttgcacctcctcggcgaactgcttaatcacctccggatcctgaatatcgcgccgctgggcggtgaccgacatcagcaggtggtgacgcaccagccaggcgaccagctgcgtttcgcgcgagttcagcccgtgcagctcggcaaacttcagcacatcctgcgcgccgaggatcgagtggtcgccgccgcgccctttggcgatgtcgtggaacagggcggcaattaagatcagctccgggtgcgttaagcgcggccacagctccacgcacagcgggtggcggctgcgggtttcttctttggcaaagctttccagcttgagcatcacccggacggtgtgttcatcgacggtgtaggcgtgaaacaggtcgaactgcatctggccgacgatatgcgaccactgcggcatataggcccacagtacgctgtggcgatgcatcggcagcagcccgcgacttaccgccccctgatggcgcagcatactaagaaagagcgtgcgcgcctccgggatatagcacagcggctgggtgagatgacggcgggcgtggcgcagatggcgcaacgtcgttgagtagatgccggtgatggtgctattgcgcaccatgatataaaacatgcgcagaatggcctgcggttcgcgaataaacagcgtgtcgtcacgcagatcgataagggtgccgcgcagctggaaatcatcatcgatcgggcgtggtttttcatcctcggtcagggcgaggatggcctcctcaaacagctgaagcagcatctgattcagctcgctcacccggcgggtaacgcggaagaagtccttcatcatgtgttcaatcggctggttgccgtcgccttcatagcctagccggcgggccacgctgagctggcggtcgaatagcagacggttgtcatagcgcgtgagttcgagatgcagcgcgaaacggatgcgccacagctgatgcagacactcattgagttcattgcgctcggcttcggtcagaaagccgaagccgaccatctcatccattgaggtggcgccgaaatggcggcgagccacccactgtagcgtatggatatcgcgcaagccgccggggctgcttttcacgtccggctcgaggttatagctggtgccatgatagcgctgatgacggacgttctgctcttcgaccttggcggcgaagaacttttccgatggccagaagccgtcgctaaaaatatgtttttgcagttcaaggaacagcgcgacgtcgccgatcagcaggcgcgattcgattaagttggtggcaacggtcagatccgagagaccttccagcaggcactcttcgagggtgcgtacgctgtggcccacctccagcttgacgtcccacagcagggtgagcagttcgccgactttttgcgcctggtcgtccggcagttttttacgactgaggatcagcagatcgacgtctgagagcgggtgcagttcgccacggccatagccgccgacggcgaccagcgccaggtcgctgacggattcaaaaccgcaggcgatccataatcgctgcagcaactggtcgataaattcggtgcgcgccgcgatgagctgctccgcgacgatgccggagtcaaacgcctcgcccagccagtgctggaaggtatcgatgtgcgccttgattgcggcacagttcagatcgccctgcggccaactcaccgggtgttccggcgggacgggcaggagaggggaggctgtgtcaggtaatgagttgctcatcgcgtcaccataagaaaaaactatctaataaaaaagccggcgggcgccggcttttcatcattcatcgtgcgagattatcgccgggatggtgtcatccttgcgtagcgtcagaatttcgcagccgttgtctgtcaccacaatagtatgctcgtactgcgcagacaagctccggtctttggttttcaccgtccagccgtctttcatgctgcggatctcttttttaccggcgttgaccatcggctcgatggtgaaggtcatgcctggtttgagtacgacgttggtctccggcgaatcgtagtgcagtacctgaggttcttcatggaacccgcggccgatgccgtggccacagtactcacgtaccacggagaaaccttcggcttccacaaatttctggatcgccgcgccgatcgcgcgcaggttgatgcctggcttcaccattctcagcgccaggtacaggctttcctgagtgatgcggcacaggcgctcgccgagaatcgtcggtttgccaacgataaacattttggaggtatcgccatggaaatcatctttaatgacggtcacgtcgatattcacgatatcgccatctttcagcagcttgccgtcatcagggataccgtgacagaccacttcattgaccgaaatgcagacggatttcggatagccgtgatagccgaggcaggcggaaatggccttctgctcgttaacgatatagtcgttacagatgcggtccagttcgccggtgctaacgcccggtttgacgtagggttcgatcatttccagcacttcggcggccaggcggccggcaacgcgcattttttcgatgtcttcagatgtcttaatagagatagccatggagtatgtccagcagtgtcgatattttcgacaataatagagtaagtcctgtcaatggtaacagtccgggcaggctggtgccaaactgagaatcattaacagcacgcgacgtcaacaagagttggtgtctggatggattttgtggtataaagcgcgccggacttccgttccatctcagatacacaaggatggacgtaagcgacatagctcactttgtgtaataacacacacgtatcggcacatattccggggtgcccttcggggtcggtaatatgggatacgtggaggcataaccccaatttaatctatagaggttttaaacatggcaactgtttccatgcgcgacatgctcaaggctggtgttcacttcggtcaccagacccgttactggaacccgaaaatgaagcctttcatcttcggcgcgcgtaacaaagttcacatcatcaaccttgagaaaaccgtaccgatgttcaacgaagctctggctgaactgaacaagatcgctgctcgtaaaggtaaaatccttttcgttggtactaagcgcgctgcaagcgaagcggtaaaagacgctgctctgagctgcgatcagttcttcgtgaaccatcgctggctgggcggtatgctgactaactggaaaaccgttcgtcagtccatcaaacgtctgaaagacctggaaactcagtcccaggacggtactttcgacaagctgaccaagaaagaagcgctgatgcgcactcgtgagctggacaagctggaaaacagcctgggcggtatcaaagatatgggcggcctgccggacgcactgttcgttatcgacgctgaccacgagcacatcgctatcaaagaagcaaacaacctgggcatcccggtatttgctatcgttgataccaactctgatccggacggcgtagacttcgttatcccgggtaacgacgatgcaatccgcgcagtaagcctgtacctgggcgctgttgctgctaccgttcgtgaaggtcgctctcaggacctggcttctcaggcggaagaaagcttcgtagaagctgaataataaggtttaagcccttattagtaccgtgtatgaataggggcccattatcggccccttttttcaatttacgctgtttggccgttggccgggcagtatccacatctcccgaggattttagaatggctgaaattaccgcttccctggtaaaagagctgcgcgaacgtactggcgcaggcatgatggattgcaaaaaagcgctgactgaagcgaatggcgacatcgagctggcaatcgaaaacatgcgtaaatccggcgcgatcaaagcggcgaagaaagcaggcaacgtggctgctgacggcgtgatcaaaaccaaaatcgaaggcaactacggttacattctggaagttaactgccagactgacttcgttgctaaagatggtggtttccaggcatttgccgacaaagtactggacgccgctgttgcaggtaaaatctccgacgttgaagttctgaaagcgcagttcgaagaagaacgtgttgcgctggttgctaaaatcggcgagaacatcaacatccgtcgtatcgctgttctggaaggcgacgttctgggcagctaccagcacggtgcgcgtatcggcgttctggttgccgctaaaggcgctgacgaagagctggttaagcagctggcaatgcacgttgctgcaagcaagccggaattcgttaagccggaagacgtgtctgctgaagtggtagagaaagagtaccaggttcagctggacatcgcgatgcagtccggtaagccgaaagaaatcgcagagaaaatggttgaaggccgcatgaagaaattcaccggcgaagtttctctgactggtcagcctttcgttatggagccgagcaaatctgttggccagctgctgaaagagcacaacgctgacgtgactggcttcatccgctttgaagtgggcgaaggcattgagaaagttgagactgactttgcagcagaagttgctgcgatgtccaagcagtcttaatttttaaaaaaaggagccgcctgagggcggcttctttttgcgcccattttgtaaattcagccaactgcttatagtggccgcgctgaaatgcgacatacaatgtcgccggaattatcacatctcattcgttgacagtctcaggaaagaaacatggctaccaatgcaaaacccgtctacaaacgtattctgctgaaattaagtggcgaagcgctgcagggctcagaaggcttcggtattgatgcaagcatacttgaccgcatggctcaggagatcaaagagctggttgagctgggtattcaggttggcgtagtaattggtggcggtaacctgttccgtggtgctggtctggcgaaagcgggtatgaaccgcgttgtgggcgaccacatgggcatgctggcaacggtcatgaacggcctcgcaatgcgtgatgcgctccaccgcgcctatgtgaacgctcgtctgatgtccgccattccgctgaacggcgtatgcgacaactacagctgggcagaggcgatcagcctgctgcgcaacaaccgcgtagtgatcctctccgctggtaccggcaacccgttctttaccaccgattccgcagcctgcctgcgcggtatcgaaattgaagccgatgtggtgctgaaagccaccaaggttgacggcgtattcaccgctgacccggcaaaagatccttctgccaccatgtacgatcagctgacctacagcgaagttctggaaaaagagctgaaagtcatggatctggcggccttcaccctggcgcgtgaccataaattaccgattcgcgtcttcaacatgaacaaacctggcgccctgcgtcgcgtggtgatgggcgaaaaagaaggcacattgatcacggaataattcccgtcagcgccaaatccgggtaatattccgctttactttcgcggggatattgcccggtgattttcattaaatctgactatacttagctcattttccgacgggtgtcccgtctggtctgactgagacaagctttcaaggattcgtaacgtgattagcgatatcagaaaagatgctgaaatccgcatggaaaaatgcgtcgaagcattcaaaaaccaaatcagcaaaattcgcacgggtcgtgcttctccgagcctgctggacgggattgttgttgaatactacggtactccgaccccgctgcgccagctggccagcgtcactgtcgaagactcccgtaccctgaaaatcaacgtctttgaccgttctatgtccgcggccgttgaaaaagcgatcatggcctccgacctcggtctgaacccaagctctgccggcagcgatattcgtgtcccgctgccgccgctgaccgaagagcgtcgtaaagacctgaccaagatcgtgcgtggtgaagccgagcaggcgcgcgttgccgtgcgtaacgttcgccgtgacgccaacgataaagtcaaagcgctgctgaaagaaaaagagatcagcgaagatgacgatcgccgttctcaggacgacgtgcagaaaatgactgacgccgccatcaaaaaagttgacgcggcgctggcagacaaagaagcggaactgatgcagttctaatgctctgcccttactcgggccagacaggctttggcctgagtaaaatctgaaacgccgtacagaagactgtacgctcaattctcgggattgcgttgcgaccgctggccttgtagcctttagcgcttagttgaaggcttaatgccgccgtctcatccccgatagttgctgcgtaggggcttgctggcggcgttttgctttttattctgtttccactcttctggacgtctcatgaagcaattaaccgttctcggttcgaccggctccattggctgtagcacgctggacgtggtgcgccataaccctggtcgcttttccgtcgccgcgctggtcgcggggaaaaacgttgaccgtatggttgaacaatgcctggaatttaccccccgttacgcggtgatggacgatgcgcaaagcgctgagcggttgcgcacccgtctgcatgagcatggcagtcgcaccgaggtgctgagcggccagcaggcggcggcagaggtcgcggcgctggatgaggtcgatcaggtcatggcggcaatcgtcggcgcggcgggactggtgccgacgctggcggcgatccgcgccgggaaaacggtattgttagcgaataaagaatcgctggtgacctgcggtcgcttattcatggaggcggtgcaacagtcgggggcgcgattgctaccggtcgatagcgagcataacgctatttttcagagtatgccggagacaattcagcagcatctgggatacgctgatcttgcccagaacggcgtctcgtctatcctgctgaccggctccggtgggcctttccgcgagacggccgtggctgaactggcggcgatgaccccggatcaggcctgccgtcatcccaactggtcgatggggcgcaagatctccgttgattcggccacgatgatgaacaaaggcctggaatatattgaagcgcgctggctgtttaacgcctcggcccagcagatggaagtgctgatccatccgcagtcggtgatccactcgatggttcgctatcaggatggcagcgtgctggcccagcttggggagccggatatgcgcacgccgatcgcccataccatgggctggccgcagcgactgaattccggcgttaaaccgctggacttctgtcagttgagcaatctgagcttctccgcgccggactatacgcgatatccgtgcctgaagctggcgatggacgcgtttgacgtcggccaggccgcgaccacgacgctgaatgcggctaatgaagagtcggttgccgcgtttctgcatggcgatatccgctttaccgatattgcggcggttaacctggcggtgctggataagatggacctgcaggagccgcaaagcattgatgatgttctggttatcgacgccgaggcgcgcgcaatcgctcaccagcagctgcagcggttggttgcgcaggcgtaacgcggtgatatttgtgggcgcaaggcttcggtgatatagtctgcgccacccgatcgttgcattttgttgttaaagattacggtggccgtgacaaaacacggcttttttgcgtaaagcttttggttgttctctgcgattggctgcagccccggcaccggataaaaatgcgtatccagcgcggcccggtggcctctgtttggtggctagttaatccttattatggacttaaaacgcgtgatgttgtctgctaatcaaactgtcagcgaaatatcgcccacccatggctgccgtcatgtcgccattattatggatggcaacggccgttgggcgaaacggcaaggtaaaattcgcgctttcgggcataaggccggtgcgaaatccgtgcgtcgcgcggtctccttcgcggcgaataatgggattgaggcgttaacgttatacgcgttcagcagcgaaaactggaaccgtccggctcaggaagtcagtgcgctgatggaactgttcgtctgggcgctggatagcgaagtcaaaagcctgcaccgacacaatgtgcgtctgcggattattggcgacaccacgcgcttcaatgcgcgcctgcaggagcggatccgcaaagcggaagcgctaaccgcaaacaataccggcttaacgctgaatattgcagccaattacggcggtcgctgggatattacccagggcgttcgtttgctggcgaaacaggtacaggacgggacgctgctgcctgagcagatcacggaagacatgctgagtcagcaggtctgcatgcatgaactggctcccgttgatttagttattaggaccgggggagagcaccgaataagtaactttctgatttggcaaattgcctatgccgaactttactttacggatgttctttggcccgattttgctgaacaggactttgaaggtgcactccatgcctttgttaatcgagagcgtcgtttcggcggcactgagccgggtggcagtcatgcctgatgggggtcacttttgctgaagtatcgcctgatatctgctttcgtcttaatccccatcgtcattgcggcattgtttttattgccgccgatgggctttgctatcgtcaccctggtggtctgtatgctcgccgcctgggagtggggacaactgagcggttttacctcgacgtcgcagcgggtttggctggcggtgctgtgcggccttctgctggcggcgatgctttttctgctgcctgaataccattatgacgttcatcaaccgatggttgaagggtcgctatgggcctcttttgcctggtggatcgtcgcgttactgctggtgctctcatacccggcgtcggcggcattctggcgccactctaaggtgctgcgcctcatcttcggcattctgaccatcgtcccgtttttctggggcatgctggcgctgcgcgcctggcactatgccgataaccactacagcggcgcgctgtggctgctgtacgtcatgatcctggtgtggggcgcggactctggcgcctatatgtttggtaaaatgtttggcaagcacaagctggcgccgaaggtctcaccgggtaaaacctggcagggcttttttggcggtttgctgaccgcggcagtgatttcctgggcctacggcgtgtgggcccatcttgacgtcacgccgacggtgctgctggtttgttcggtggtggcggccctggcttcggtgctgggcgacctgacggaaagtatgtttaagcgcgaggccggcattaaggatagcgggcacttgattcccggacatggtggtattctcgatcgtatcgacagcctgacggcggcggtaccggtcttcgcctgtctgctactgttggtcttcaggacgatttgacggaaggttatatgctgagcgtgctctggaatctggcggcttttatcattgcgcttggcgtactgattacggtgcatgagtttggccatttttgggtggcgcgccgctgcggtatccgggttgagcgtttttctatcggcttcggcaaagcgctgtggcggcggatggataagcagggcacagagttcgtcatcgccctgatcccactgggcggctacgtcaagatgctggatgagcgtgttgaagcggtggcgccggagatgcgtcactacgccttcaacaataaaactgtcggtcagcgtgcggcggttattgccgccggccccatcgctaacttcattttcgctatctttgcttactggctggtctttatcatcggcgttcccggcgtgcggccggtggtgggtgaaataacgcccaattcggttgccgcgcaagcacaaattgcaaaaggaacggaacttaaagcgatagatggtatcgaaacgcctgattgggatgcggtgcgtctgcagctggtggccaaaatcggcaacccgcaaacaatagttaccgtcgcccctttcgggaccaatcagcgccaggataaaatcgtcgatctgcggcactggtcgtttgagccagacaagcaagatcccgtgacctctctggggatccagccgcgcagcgcgcagattgatacggtgctggctgaggttcaggcgggatcggcagcccagaaagcgggtttgcaagcgggcgaccggatcgttaaagtcgatggtcaaccgttaacgcagtggatgacgtttgttaatctggtgcgcgataatccgggcaaagcgctggcgctggagattgaacggcaggggagtgcgctgccgttaaccctgacgccggatgcgaaaacggtgaaaggtaaggcggaagggttcgcaggggtggtgccaaaggtcatcccgctgcctgaagaatacaagacagtacgtcagtacggaccgtttgccgccatcgctgaagccacggataaaacctggcaactgatgtcgctgacggtcaggatgctgggtaaattgataaccggtgatgtcaaactgaacaacctcagtgggccgatctctatcgctcagggggctggaatgtcagcggagtttgggttgatttattatctgatgttcctggcgctgattagcgtgaacctcggaatcatcaacctgttccctctacccgtactggatgggggacatctgctgtttttagcgattgaaaagctgaagggcgggccggtatccgagcgagttcaagactttagttatcgcattggctcaatactgctggtgctgttaatggggcttgcacttttcaatgatttctctcggttataagagagtttgttaggaagaacgcataataacgatggcgatgaaaaagttgctcatagcgtcgctgctgtttagcagcgcgactgtatacggtgctgaagggttcgtggtgaaggacattcatttcgaaggcttgcagcgtgtcgctgttggtgcggccctcctcagtatgccagtgcgtcctggcgatacggtgaccgacgatgatatcagtaacactattcgcgcgctgtttgccactggcaacttcgaggacgtccgcgtcctgcgcgatggtgataccctgctggtgcaggtgaaagagcgtccgacgatcgccagcatcaccttctccggcaacaagtcggtgaaagatgacatgctcaagcagaaccttgaggcctcaggcgttcgggtgggcgagtcgcttgaccgcacgaccatcgcggatatcgagaagggtcttgaagacttctactacagcgtcggtaaatacagcgccagcgtcaaagcagtcgttacgccgctgccgcgtaaccgtgtcgatttgaagctggtcttccaggaaggcgtctccgcaaaaattcaacagatcaacatcgtcggcaaccatgcgttttcgaccgatgagctgatctcccacttccagctgcgcgatgaggtgccgtggtggaacgtggtcggcgaccgtaaataccagaagcagaagctagcgggcgaccttgaaaccctgcgcagctactacctggatcgcggctatgcccgtttcaacatcgattctacccaggtcagcctgacgccggataagaaagggatctacatcaccgtcaacatcaccgaaggcgatcagtacaagttttccggagtgcaggtgacgggcaacctcgctggccattccgcggaaatcgaagcgctgactaaagttgagccaggcgaactgtacaacggcgcgaaagtgaccaggatggaaaacgacatcaagaaattgttgggtcgttatggttacgcctatccgcgcgtgcagtcgcagccggagatcaacgacagcgataaaaccgttaagctgcacgttaacgtcgacgcaggcaaccgttattacgtgcgtaaaattcgcttcgaaggcaacgacacctctaaagatgccgtactgcgccgcgaaatgcgccagatggaaggcgcatggctgggcagcgacctcgtcgatcagggtaaagaccgtctcaatcgtttaggtttctttgaaacggtggatactgatacccagcgcgtgccgggcagcccggaccaggtcgacgttgtctacaaggtgaaagagcgtaacaccggtagcttcaacttcggtatcggctacggcaccgagagcggcgtcagcttccaggcgggcgttcagcaggataactggttaggtactggctatgctgtcgggatcaacggtaccaaaaacgactaccagacctataccgagctgtcggtgaccaacccgtacttcaccgtagacggtgtaagcctcggcggtcgtgtcttctataatgactttgatgcaaacgatgcggatctgtctgactataccaacaaaagctatggtacagacattacgctgggcttcccggtcaatgaatacaacacgctgcgcgccggcgtcggttatgtgcataactccctgtccaatatgcagccgcaggtggcaatgtggcgttaccttaactcgatgggccagtatccggacaacaccaacgaccggaactcgttcagtgcgaatgacttcaccttcaactacggttggacctataacaagcttgaccgcggcttcttcccaacggaaggttcgcgcgtcaacctgaacggtaaggtgaccattccgggctcagacaacgagtactacaaagcgacgctggataccgcgacctacgtgccgatcgacaacgatcatcagtgggtagtactgggtcgtacgcgctttggttatggcgatggtatcggcggcaaagagatgccgttctatgagaacttctatgccggtggttccagcaccgtgcgtggcttccagtcgaacaccattggtccgaaggcggtgtacttcccggcaagcagtcgtcatgatgatgacgatagttacgataatgaatgtaagagcaccgaatccgcaccgtgtaaatccgatgatgcggtgggcggtaacgcgatggcggtggccagccttgagctgattaccccgacgccgtttattagtgacaaatatgcgaactcggtccgtacttccgtcttctgggatatgggtaccgtatgggatactcactgggattcgagcgcgtacgctggttatccggattacagcgatccgagcaacatccgtatgtctgcgggtattgccgtgcagtggatgtcgccgttggggccgttggtcttctcctacgcccaaccgttcaaaaagtacgatggagacaaagccgaacagttccagtttaacattggtaaaacttggtaattgttggcggcaacggaatgcaagtgcagtatagcgctgactgtaggcgataacgcgtttatcgcctcgccacgcaaataacggtacccctgggtactcatgggatggtaaggagtttattgtgaaaaagtggttattagctgcaggtctgggtttggcaatggtaacttccgctcaggcggcagataaaattgccctggtgaacatgaacagcctgttccaacaggttgcccagaaaactggcgtttccaacacgctggaaaacgagttcaaaggccgcgctagcgaactgcagcgtatggaaggcgacctgcaatccaaaatgcagcgtctgcagtccatgaagccgggcgccgaacgtaccaaactggaaaaagacgtgatggctcagcgccagaccttctcccagaaagcgcaggcgtttgaacaggatcgcgcacgtcgttccaacgaagagcgtggcaaactggttacccgtatccagactgccgtacagagcgtagcgaaagatcagagcatcgatctggtggttgacgcgaatgccgttgcatataacagcagcgatgtaaaagacatcaccgctgatgtgctgaaacaggttaaataagtaatgccttcaattcgactggctgatctcgcgcagcagttggatgcagaattacacggtgatggcgatatcgtcatcaccggcgttgcgtccatgcagagcgcgaaaacgggccaaatcactttcatggtcaaccctaagtaccgtgagcacctggccgcttgccaggcttctgccgttgtgatgacgcaggatgatttaccttttgcccatagcgccgcgctggtagtgcgtaacccctacctgacctacgcgcgcatggctcaaattcttgataccacgccgcagccggctcaggatatcgcgccgagcgcggtcatcgatccgtcggcgaagctgggtagcaacgttgccatcggcgccaacgcggttatcgaatccggcgtagtgctgggcgataacgtagttatcggcgcaggctgcttcgttgggaaaaatacgaaaataggcgccggctcgcgtttgtgggctaatgtgaccgtttaccatgagattgagatcggcgagaattgcctgattcagtccagcacggtgattggcgcggatggctttggctacgctaacgatcgcggtaactgggtaaagatcccgcagctgggtcgcgtcattattggcgatcgcgtggagattggcgcctgcaccacgattgaccgtggtgcgctggacgataccgtgattggcaacggggttatcattgataaccagtgccagattgcgcataacgtggtgattggcgacaataccgcggtcgctggcggcgttatcatggcgggcagcctgaaaattggccgctactgcatgattggcggcgccagcgtgattaacggccatatggaaatctgcgataaggtcaccgtcacggggatggggatggtgatgcgtcctatcagcgaacctggcgtatattcctccggtattccgctgcagccgaacaaggcgtggcgtaaaaccgctgcgctggtgatgaatattgacgagatgagcaagcgcctgaaagcgattgagcgcaaggttaatcaacaagactaattcatcatttggtcacatgacattttcggcctgttgcattcgctaaaagattgccgcaggccgtgttattattgccttttagtacatttagacaggaagagtattttgactactgacactcatactctgcacattgaagagattctggaacttctgcctcaccgttacccgttcctgctggtagaccgcgtgctggattttgaagaaggtcgttttctgcgcgcagtaaaaaatgtttctgtaaacgagccgtttttccaggggcacttccctggtaagccgattttgccgggcgtcctgattctggaagcaatggcgcaagccaccgggattctggcgttcaaaagcgtcggaaaactggaaccaggcgagctgtactacttcgcgggtatcgatgaagcacgcttcaaacgcccggtagtaccaggcgatcagatgattatggaagtcactttcgagaaaacccgccgcggcctaacccgtttcaaaggcgttgcgctggttgacggtaaagtggtttgcgaagcgacgatgatgtgtgcgcgtagccgggaggcctgatacgtgattgataaaaccgcttttgttcatcctaccgccattgtagaagaaggcgccgtgattggcgctaacgtccacattggtccgttttgtattgttggcgctaacgtcgaaatcggcgaaggctccgtgctgaagtctcacgttgtcgttaacggccacaccaaaatcggccgtgacaatgagatctatcagttcgcttccatcggcgaagttaaccaggatctgaaatatgctggcgaaccgacccgggtggaaattggcgatcgcaaccgcattcgcgaaagcgtcaccattcatcgcggcacagtacagggcggtggattaacaaaggtgggcaacgataacctgctgatgatcaacgcccacgtggcgcacgattgtacgcttggcgatcgctgcattctggccaataacgcgacgctcgcgggccatgtttcgctggatgattatgtcattatcggcggcatgacggcggtgcatcagttctgcgtcattggctcacacgttatggttggcggctgctccggcgtggcgcaggacgttccgccgttcgtaattgcccagggcaaccatgcgacgccgttcggcgttaacatcgaagggctgaaacgccgcggcttcagccgggaagcaatcaccgcgatccgcaacgcgtataaactgctgtaccgcagcggcaaaacgctggaagaagccaagccggaaattgccgaactggctgctcagcatcctgaggttcagccgtttgtcgatttcttcgctcgttctacccgcggcttgattcgttaatggctgaacagcgtcccctgacgattgccctggtcgccggagaaacctccggcgatattctaggcgctggtctcatccgcgcgcttaaagcacgcatcccgaatgcgcgctttgtcggcgtggcggggccgctaatgcaggcggaagggtgcgaagcctggtatgaaatggaagagctggcggtgatgggcattgttgaagtgctcggtcgcctgcgtcgcttactccatattcgcgccgatttgacccgccgcttcggcgagctgcgtcccgatgtcttcgtcggcatcgacgcccctgactttaatatcaccctcgaaggaaatctgaaaaagcagggcatcaaaaccattcactacgtcagcccgtcggtctgggcctggcgacaaaaacgcgttttcaaaatcggcagatccaccgatctggtgctggcctttctgcctttcgaaaaggcgttttatgacaaatttaacgtcccctgccgctttattggccataccatggcggatgcgatgccgctggatcctgacaaaggcgctgcgcgcgaccggttagggatcccgcacagcgtgcgctgcctcgctctgctacccggcagccgcggcgcggaagtcgaaatgcttagcgccgacttcctgaaaaccgcgcagcttctgcgcgccacctatcccgatctgcaggtggtggtgccgctggttaatgctaaacggcgggagcagtttgagcgtattaaagctgagacggcgccggatatgatcgtgcatatgctggacggtcaggcgcgcgatgcgatgatcgccagcgacgccgcgctgctggcctccgggacggcagcgctggagtgtatgctggcgaaatgcccgatggtggttggctaccggatgaagccgttcaccttctggctggcgaagcggttggtaaaaaccgactatgtctcgttaccgaacctgctggccggtcgcgaactggttaaagagctgctgcaggatgagtgcgagccccaggcgctggcagccgctctgcagccgctgctggccgatggcaaaaccagccatgagatgcatgagacgttccgcgccctgcatcagcagatccgctgcaacgccgatgagcaggcggcggacgccgtactggagttagcaaaacaatgatggagttcgtctatccgcatacccatctggttgccggcgtcgatgaggtcgggcgtggccccctggttggcgcggtggtgaccgcggcggtgatcctcgatccggcgaagccgattgtgggtctgaatgattccaaaaaactcagcgagaagcgtcgtctggcgctgttcgatgagattaaagagaaagcgctgtgctggagcctggggcgcgccgagccgcacgaaatcgacgagctgaatattctgcatgccactatgctggcgatgcagcgcgccgtcgccggcctgagcattgttcctgagtttgtcctgatcgatggcaaccgctgtccgtcgctaccgatgccctcccaggcggtggtgaaaggcgacagccgggtggcagaaatcagcgcagcgtctattctggcaaaagtcactcgtgacgccgaaatggccacgctggacctcgcatttccccactacggatttgcccagcataaaggctatcccaccgctgttcacctgcagaagctgcaggaacacggcgcaacagagcatcaccggcgcagttttggcccggtgaagcgtgccctgggcctggcgtccaactaagtcaccgggatctaaagatggctgaaccacgtttcgtacacctgcgggtgcacagcgactattccatgatcgatgggctggcaaagaccgggccgctggtgaagaaggcggcctcgcttggcatgccagcgctggcgatcaccgatttcaccaacctctgcggactggtgaagttctacgggacgggacacggcgcggggattaagccgatcgtcggcgccgactttcacgtgcagtgcgacctgctcggcgacgaatttaccgagctgaccgtgctggcggcgaacaataccggctaccagaacctgaccctgttgatttcccgcgcctatcagcgcggctacggcgccctggggccgtggatcgatcgcgactggctggtggaacatcaggaagggctgattctgctctccggcggccggaaaggtgacgtcggcgtcagcctgatccgcggcaatatgccgctggttgaacagtgcgtcgccttctacgaagagcatttcccggaccgctattttctggagctgatccgtaccggtcgacaggatgaagaggcctatctccacgccgccgtggcgctggcggaagcgcgcggtctgccggtggtggcgaccaacgatgtccgctttctcgacaccagcgatttcgacgcccatgaaatccgcgtcgcgatccacgacggctttacgctcgacgacccgaaacggccgcgcaactactcgccgcagcaatatatgcgcagcgaggaagagatgtgcgagctgttcgccgatattccggaagcgctggcgaacagcgttgaaattgccaagcgctgcaacgtcaccgtgcggcttggcgaatatttcctgccgcagttcccgaccggcgatatgaccacggaagatttcctggtcatgaaatcgaaagagggtctggaagagcggctggaattcctcttcccggatcctgccgtccgtgctgaaaagcgcccggagtatgaccagcgtctggatattgagctccaggttatcaaccagatggggttcccgggctacttcctgattgtgatggagtttatccagtggtcgaaggataacggcgtgccggttggcccgggacgcggttccggcgccggttcgctggtggcctatgctctgaagatcaccgatcttgacccgctggagttcgacctgctgttcgaacgtttccttaacccggaacgtgtctcgatgcccgacttcgacgtcgacttctgcatggagaaacgcgaccaggttatcgagcacgtggcggatatgtacggccgcgacgcggtatcgcagatcatcaccttcggtaccatggcggcgaaagcggtcatccgcgatgtcggtcgcgtgctgggtcacccgtacggatttgtcgatcgtatctccaagctggtgccgcccgatccgggcatgacgctggcgaaagccttcgaggccgagccgcagctgccggagatctacgaggcggacgaggaagtgaaagcgctgatcgacatggcgcgtaagctggaaggggtgacgcgaaacgccggtaaacatgccggtggggtagttatcgctccaaccaaaatcaccgatttcgcgccactgtattgcgatgagcaggggctgcatccggttacccagtttgataagaacgacgtggaatacgccgggctggtgaaattcgacttcctcggtctgcgtacgctcactatcattaactgggcgctggagatgatcaacaagcgccgtgagaagaacggcgaagggccgctggatatcgccgccatcccgctggatgacaagaaaagcttcgacatgctgcagcgctcggaaaccaccgcggtcttccagcttgaatcgcgcggcatgaaagatctgattaaacgcctgcagccggactgcttcgaagatatgatcgcgctggtggctctgttccgcccgggcccgctgcagtcggggatggtagataactttatcgaccgtaagcatggccgcgaggagatctcttatccggacgtgcagtggcagcatgaaagcctgaaaccggtgctggagccaacctacggcatcatcctgtatcaggaacaggtcatgcagattgcccaggtgctgtccggatataccctcggcggcgcggacatgctgcgtcgtgcgatgggtaagaaaaagccggaggagatggccaagcagcgttctatctttgaggatggggcgaagaaaaacggcattgacggcgaactggcgatgaaaatcttcgacctggtggagaaattcgccggttacggatttaacaaatcgcactccgccgcctacgcgttggtctcctaccagacgctgtggcttaaggcgcactacccggccgagtttatggcggcggtgatgaccgccgatatggacaacaccgagaaagtggttggcctggtggatgagtgctggcgaatggggctaaaaatcctgcccccggatattaactccggcctgtaccatttccacgtcaacgacgatggcgagatcgtctacggcattggcgccatcaagggcgtcggcgaaggaccgatcgaagcgattattgaggcgcgcaacaatggcggctatttccgcgagctgttcgacctctgcgcgcgaaccgatattaaaaagctcaaccgtcgggtgctggaaaagctgattatgtccggggcgttcgatcgtctcggcccacatcgcgcggcgctgatgaattcgctgggcgatgcgttgaaagccgctgaccagcacgcgaaagccgaggccatcggccaggctgatatgttcggcgtgctggcggaagagcccgagcaaattgagcaatcctacgccagctgccagccatggcctgagcaggtggtgctggatggtgaaagggagaccctggggctatacctcaccggacacccgattaaccagtatctgaaggagattgagcgctacgtcggcggcgtgaggctcaaagacatgcatccgaccgaacgtgggaaagtcaccacggcggcggggctggtgattgcggcgcgggtaatggtcaccaagcgcggcaatcgtatcggcatctgtaccctggatgaccgttccgggcggctggaagtgatgttattcaccgacgcgctggataaatatcagcagttgctggaaaaagaccgcatacttatcgtcagcggacaggtcagctttgatgactttagcggggggcttaaaatgaccgcccgtgaagtcatggacattgacgaagcccgggaaaaatatgctcgcgggcttgctatctcgctgacggacaggcaaattgatgaccagcttttaaaccgactccgtcagtctctggaaccccaccgttcgggaaccattccagtgcacctctactatcagagggcggatgcacgcgcgcggttgcgtttcggcgcaacatggcgcgtctctccgagcgatcgtttacttaacgatctgcggggccttatcggctcggagcaggtggaactggagtttgactaatacaggaatactatgagtctgaatttcctagattttgaacagccgattgcagagctggaagcgaaaatcgattccctgactgcggtaagccgtcaggatgagaaactggatattaacatcgacgaagaagtgcatcgtctgcgtgagaaaagcgtagagctgacgcgcaaaatcttcgccgatctcggtgcatggcaggttgcgcaactggcgcgccacccgcgccgtccttacaccctggattatgtccgcctggcgttcgacgaatttgacgaactggccggtgaccgcgcctttgctgacgataaagcgattgtcggcggtatcgcgcgtcttgatggtcgtccggtgatgattatcggccaccagaaaggccgtgaaactaaagagaagatccgtcgcaactttggcatgccggcgccggaaggttaccgtaaagcgctgcgcctgatggaaatggctgagcggtttaaaatgccgatcatcactttcatcgacaccccgggtgcttatccgggcgtcggcgcggaagagcgcggccagtcggaagcgatcgcccgtaacctgcgtgaaatgtcgcgtttgagcgtgccggttatctgcaccgtgatcggtgaaggcggctccggcggcgcgctggcgatcggcgtgggcgacaaggtcaacatgctgcagtacagcacctattcggtcatttcgccggaaggctgcgcctccattctgtggaagagcgcggataaagcgccgctggctgcggaagcgatgggcattatcgccccgcgtctgaaagagctgaagctgatcgattctatcgttccggaaccgctgggcggcgctcaccgcaacccggaagcgatggcggcaagcctgaaggcgcagctgctggcagacctggcggatctcgatctgctcagcgaagaagagctgctgaaccgccgctatcagcgtctgatgagctacggttacgcttaactttttcgctaggactaaacactaagggccggattttccggccctttttttatgtgcgatgcgcccgggggattgctatgatgcttgacttaggtgaataccaggaggaaagcgtgaatatcatcgccatcatggggcctcacggcgtctatcacaaagacgaaccgatcaaagaactggaagcggcgctgcagcgccagggtttccagaccatctggccgcaaaacagcgccgacctgctgcagtttatcgagcacaacccgcgcatctgcggggtgatcttcgactgggatgaatacagcgtcgatctgtgcagcgatatcaatcagctcaatgaatacctccccctgtacgcctttattaacgcccactcgacgatggacgtcagcagtcaggatctgcgcatgacgctgtggttcttcgaatatgcgctgggactctccgaagagatcgccacccgcattgggcagtacacccgcgagtacctggagaatatcactccgccgtttacccgcgcgctgttcaactatgtccaggagggaaaatataccttctgtacgccgggccatatgggcggcagcgcctatcagaaaagcccggtgggctgcctgttctatgatttttttggcgggaatacgctgaaggcggatgtctcgatttcggtcaccgagctgggctccctgctggatcataccggcccgcacctggaggcggaggagtatatcgcgcgcgcctttggcgccgagcaaagctatatggtgaccaacggcacctcgacgtccaataaaattgtcggcatgtactcggcgcccgccggcagcaccctgctgattgaccgtaactgtcacaaatcgctggcccacctgctgatgatgagcgatgtggttcccctgtggctgaagccgacccgcaacgcgctggggatcctcggcggtatcccccggcgcgagttcacccgcgacagcattcaacagaaagtgcgcgacacgggcggggcgcagtggcccgtgcatgcggtgatcaccaactctacctacgatggactgctctataacaccacctggcttaaggagacgctcgatgtcccgtcgatccatttcgattccgcctgggtgccctatacccatttccatccgatatatcaggggaaaagcggcatgagcggggagcggatccccgggaaagttatcttcgagacgcagtcgacgcataaaatgctggccgcgctgtcgcaggcctcgctgatccacattaagggcaactatgatgaagagacctttaatgaagcctttatgatgcatacctcgacctcgccgagctaccccatcgtcgcgtcgattgagaccgcggcggcgatgctgcgcggtaactccggtaaacgtctgatccagcgctccattgagcgggcgctggacttccgcaaagaggtgcagcgactgcgcgaggagtcggacggctggttctttgatatctggcagccggaagcggtggataaagccgaatgctggccggtggcgccgggcgaagactggcatggtttcaaagatgccgatgcggatcatatgtatctcgatccggtgaaggtcaccattctgacgccgggcatggacgagcaggggaatatggatgaagaggggatcccggcggcgctggtggcgaagttcctcgacgagcggggcgtggtggtggaaaaaacgggcccctataacctgctgttcctgttcagcatcggcattgataaaaccagggcgatggggctactgcgcggtctgactgagttcaaacgcgcctacgatctcaatctgcgggtgaaaaatatgctgccggatctgtacgccgaagatcccgacttctaccgcaacatgcggatccaggatctggcgcaggggatccaccgcttgatccgtcagcaccagctgccgcagctgatgctcagcgcctttgacgtcctgccggaaatgaaaatgacgccgcatcacgcctggcagcgccagatcaagggtgaggtagaaactattgaactggagaacctggtggggcggatttcggccaacatgatcctcccttatccgccgggggttccgctgctgatgccgggagagatgatcaccgaggaaagccgggcggtgctcgattttctgctgatgctttgctctatcggccgtcattacccgggctttgagaccgatattcacggcgccaagcgcgatgaggacggtgtgtatcgggtacgagtcttaaaaaatgacgaaaggcttgcgcgttaacggcgcacacgcgtaacgtggctggcttaacagaaggagtttaaccatgctgggtttgaaacgggttcaccatattgccatcattgcgacggattacgcccgcagtaaagcgttctattgcgacattctggggtttacgctgcaaagcgagttctatcgcgccgagcgcgattcctggaagggcgatctggcgctcaacggcgagtacgtgattgagctgttctcgttcccgtttccgccggcccgacccagccgccccgaagcctgtgggttgcgtcatctggcctttagcgtggatgatatcgacgctgcggtggcgcatctgacggcccatggcgtcgagtgcgaagcgattcgcgtcgatccctttaccggcaaacgctttaccttctttagcgatccggacgacctgccgctggaaatatatcagcagtaaaccttgccagcgcgaccctggcccggtaacgtgccgggccatcacttctcggtatgtttgtggatatgttggctgatattgcgcatacgcttcatccccatcgccagctgctggtggccttcagcggcggtctggactcgacggttctcctgcaccagctggtgcagctgcgggaacaggatcccgcgctgacgctgcgggcggtgcatgttcatcacggccttagcgcccatgcagaccagtgggtggcgcattgtcgtcaggtttgccagcagtggcaggtgccgctggtggtgcatcacgtgacgttagccaggggagggctcggcgtcgaggcccacgctcgtgcggcgcgctatcaggcctttcaggagacgctcaacgccggtgaggtgttagtgaccgcccagcaccaggatgaccagtgtgaaaccctgctgctggcgttaaaacgcggcagcggtcctaccggcctgtcggcgatggcgccatcctctgcctttgccggcagtcgactactgcgtcctctcctcaatgaaacccgcgaatcactacgccagtgggcgctcgcccatcagctgtcgtggatcgaagatgagagtaatcaggatgatacctatgaccgcaatttcctgcgcctgcgggtgatcccggtgctgcgcgagcgttggccgcactttagcgaggccgtcgcccgcagcgccagcctgtgcgccgagcaggaacaactgctggacgagatgttggcggcggagctggcgtcgctggtggccgaagatggctcgctggctatcgcgccgctggcgacgatgagtccgccgcgccgagcggcgctgctgcgtcgctggctcgccgggcagcaggcgccgatgcccgcccgcgaggtgcctgagcgcctctggcacgaggtggcgctggcgcgggaagatgccagcccctgtctgcggctgggggaatttaccgtccgccgttttcaacagcgtttgtactgggtgaagtatcttcccggtcagacggacagcgttcagcgctggcccgactggcgccagccgctgcggctggcggacggtctcggcgagctgacgctgcagcccggcggcaggctgcgcccgccgtcggcggatgagccggtcaccgtccgctttcgcgccagcggccacctgcatattgtcgggcgccatggcggacgcaagcttaagaagctctggcaggagctgggcgttgctccgtggcgacgagacaccacgccgctgctgttttacggcgaaacgccgattgccgcagcggacgatctgtttgtgaccacagaaggtgaagtgaaggacggggaaggggtcaggctgatgtggaggaaaacgggcgattaagcccgtttttgattcaggattcgctcaccaccacggtgccgatttccgggtgactgaagctggcgattttatccaggcgcagctcgcggacgttgccggcgagttcgaccaccagatactcgatattttttcgcgagataagatcgctggcctttgcctgcagctgttcgccatccttcagcgccagcgtcagcaccaggtgatgctggcaggccagctccaggttgtcgtaatcatcgcagttaatgggttgataagtatcattcattgacataatcgctcaccagtaagtttgctgccgcataagcggccttttccctgactgactccgaaagggcctcatccgccgcaatctcattcaatactttcaacacgcaacccagcgcatccgggatataccctaagtctccgctggctatttccgcataccgcttgcgtattaactcacaatagtggtccacatgccctcctgtcagcgttctgactcaaccgtgggatgcaagtttaagcctacgaagataaactctgtttagcaagggaactatatcatagtcatttaagcaatttcagcaggatgaaacaggttgctgcgattgacgacagccttttgccgccagtttcgctacaatgtacgccattcttttcaggagtttattcatggcgctgaaagcgacaatatataaagctgcggtaaatgtagccgatctggatcgcaaccagtttctggatgctaacctgacgctggctcagcatccgtcagaaacccaggagcgcatgatgctgcgcctgctggcatggatcaaatatgccgatgaacggctacagtttacccgcggtctgtcgtcggatgacgagccggagctgtggctgcttaacgatcatctcggggtcgatctgtggatcgaactgggtctgccggatgagcggcggattaagaaagcctgctcacgggcgcaggcggtggcgctgtttgcctataatagccgggcagctgaaatctggtggcagcagaatcagagcaagcttgcggcgtacccgaagctgaccatctggtatcttgatgatgcgcaactggcactgcttagcgcctttgccgaccgtaccatgacgctgcaggccactctgcaggagggcagtatctggttatccgacgctcggaataatctggaaattcagcttaccgcctggcaagcgtcggcatgattactattagccgcagcgtagcccttgccgacgacgaaatcgtcttgtcaggcattcgcgcccagggagcaggggggcagcatgtaaacaaagcgtcgacggcgatccatctgcgctttgatattaaagcttcaagcctgccggagttttataaagagcgcctgctcgccgccagccaccacttaatttctgctgacggtgtggttatcattaaggctcaggaataccgcagccaggagatgaaccgtgaagcggcgatcgcccggctggtggcccttattaaagaattaaccgcagtgcaaaaaagtcgccgggagacgcgaccgactcgggcatcgaaagagcgacgccttgcttccaaggcacagaagtcctcagtcaaggcgctgcgtgggaaagttcgccagtgaaggcgtcggcgaacgggtgaaatggatgataaggaaagcaaagtgaagaaaatcgtattctccgtgatagcggcctgttcgctgttcgcgctgtttggttgtaaccatcgcgccgagactgacacggtccagccagcggcgatggaagagctcaagccgatgcagcaaagctggcgaggcgtgctgccttgcgcggattgcgaaggtatcgacacctcgctgttcctggaaaaagacgggacctgggtgatgaatgagcactaccagggcgcccgtcgtgagccgtcatcctttgcctcgtacggcacctgggcacgtaccgcggataagctggtgctgaccaacagcaagggcgagaaatcttactttcgcgcgaaaggcgacaagctggagatgctcgaccgcaacggaagccccattcagtctcctctcaactataccctggagccagtgaaggccagcctgccgacgacgccgatggcgatgcgcggcatgtatttctatatggccgatgcggcaacctttaccgattgcgcgaccggtaaacgcgtcgcggtggcgaacaatgcccagcttgaacgggattatgccgccgcgcgcgggaccgatactcgcccggtactgctggtggtagaagggcactttactctcgaagcgaacccggataccggcgagatgatgaaaacgctgatgacggatcaagccggcaaatttattcccggtaaagactgcagccattgattgtcaggcccctgtccgggtaacgggcaggggatgatcccgcgcagtaccacctacttcctcctgttattagccctgtcacatcaagagtgagcgtggatctggctggcggaaaagcgtcaatcgtttctttactccgcaccgtccttcggtttgttcagccccaccagcttaccggcctgaagataaactcccagtttcaaatgcccgacatactggagctgcgtttcgggtttaaacgtggcgacgtctccttcccgcatgtgcagcagatcggaaggactgatccacgccgcctgcgcgagcgtcagcggatgcccggctcggacaaaggcctcgctgacaaactccgagcaaaaccacgctttcttgtcgccgcttgccgcatcgcccagctgcgctttagccaggccgctcacgcactgctggcgaaagtctcgtgagaaggggttgagcgagcagagcggtttggtgaccatataagggataaactgaataatgccgcgatagttatacccgctgtctttgacctgccaggcaaaacttttcatcgtcgttgcctggtccggcgtaaggtcaggcaccctgagagcaaagagtttatcgctgtgcgccagcgcctgctgaaggctaatcacttgtacgccggcgccggtggcttccgcaacctgaccttcgccaacatacagcgcgacgtggcttacggaagaggcgctgaaggcgcggatcccaagcgatgtgacgcccaggctggaggagaacagcaggtcgccggagcgcaggtcgctttcggcgatttcgcgcagtccgctgccggcaatcgagctttgacgctggagggtaacagcccaggatgatgaatggtcatcggcagcagatgtggaaggcgagctgcggccgacgtccagggtacaggcggtaagcaggagcagggcaaaagtaagcagtccgctgcggaggagatgtgcagtcattggtactgtccttgtaaaaaaaaaggccctgacatccgttcagggccctgaggtgggtgttagccttttatcgctttaaccagatattccacaatatccccggtcttaatcagctgcttctcaccgttgcgacgatacttgtattcgatatcatcgttgtcgaggttacgatcgcccagcacgatggtgtgcgggataccgatcagctccatatcggcgaacatcacgcccggacgctctttacgatcgtccatcagcacttcaataccctgggcgctcagctcggcgtacagtttctccgccagctcctgcacacggtaagacttgtgcatgttcatcggcaggatcgccacctggaacggcgcaatcgcatccggccagacgataccgcgatcgtcaaagttctgctcaatcgccgccgctaccacgcgagtcaccccgataccatagcagcccatggtcaggatctggttacgcccatcttcgccctggaccgcggctttcatcgcctcggagtacttcgtccccagctggaagatatgacccacttcgataccgcgcttaataagcagggtacctttaccgtccgggctcgggtcgccggcgacgacgttacggatgtcggccacttccggcgtcgcgacatcgcggtcccagttgatgccgaagtagtgtttgccatcgatattggcgccagcggcgaaatcgctcatcaccgctacagtacggtcgataatcaccggaaccggcatgttcaccgggcccagggagcccggaccggcgttcaccagggcgcggatctcttcttcggtggcgaaggtcagcgggctggcgacctgcggcagtttttccgctttcacttcgttcagctcgtgatcgccgcgcaccagcagggcaaccagcggggaagcgctatcttcaaccgctttcaccagcagagttttcacggttttttcgatcggcaggttgaactgctcaaccagctcggcgatggttttggcgttcggcgtatcgaccagggtcatctcctgggtggcggctgcgcgcggctctttcggcgcaacggcttccgcaaactcgatgtttgccgcgtagtcggagctgtcggagaagatcacatcgtcttcgccgctctgcgccagcacctggaattcatgagaggcgctgccgccgatagaaccggtgtcagcctgtaccgcgcggaaatccagccccatacggctgaagattttactgtaagcggcatacatcgcgtcgtaggtttcctgcagcgattcctgcgaagtatggaaagagtaggcatctttcatcaggaattcacgggagcgcatcaccccgaaacgcgggcgtacttcgtcgcggaatttggtctggatctgatagaagttcagcggcagctgtttataggagttcagctcgttgcggatcagatcggtaatgacctcttcgtgggttgggccgaggacgaacggacgatcgccgcgatcggcaatgcgcaacagttccgggccgtactgctcccagcgcccgctctcctgccacagttcagatggctgaacgaccggcattaacacctcgatcgcaccggcgttgttcatttcttcacgcacgatgttttcgacttttttcaggacgcgcacgccggtcggcagccaggtgtataacccggaggccagcttgcggatcatcccggcgcgcagcatcagctgatggctgattacctcggcgtcggcaggtgtctccttcagagtggagagcagatattggctagtacgcatgttgtaacggttccagttaaacgagcggaacaggctggttgcccagcctgaaacaaaaaagtggtttagtttaccagtgtggcaaagatgccaaaagagaggaaaataaaattagcgcgcttcgagggcaaagacttcaaaaccggaggcagtcacccgccagcggacgttgaaatccagcagccagacggcatacgtttttcccgcttgttcctcttttcggtaggccggacgcggatcctgcgccagcacctcgcggataaacgctttgatatgtgggtagcgtttttccagcgtgagtaactgtgcgtctatttccggcgtaaagctgacgttcatacccgccagcggcgcctgctgtgcatagctggcgctggcgtccggcagggcttcggcgaaaggaagatacggtttgatatcaaccaccggcgtcccgtcgacgagatcgaggctgccgagttccagtattacctgatctttctgacagcgaatgcccttgagctcaacgagcgacatgccgatgggattagggcgaaacgttgaacgggtggcgaagacgcccatccgcgcattgccgcccagtcggggaggtcgcaccgtcggacgccaaccgccttccattgtctgatgaaacacaaacaggatccacagatggctgaagctctccaggccacgcacggcgtcggcctggttatagggcgcgaccagatggagttctccgccgccgtgtttcaccaggcctggctggcgaggaacggcaaacttctctttatacggcgaacggatgacgcctatctgcgcgaactgaaatgcgctcattgcgccgagacgttaagcgctgaacccaggcaaacggcctgacggtagcagcctggcgtaccgctggtcacttcgcagcggtgaagcaggacggcattggctttcatacgcgcggcattaatttgcaggcgcttgcgcgcggtggggatattcggcggagaatcctgattcgaagcctggcaggactcgccagatacttcacccagatcgcggaacggtttaccaaccagctctgacgcatcggtgtaaatacgtactggggccgggcgggtggcgcgcggtttgctcggctcagatttaaccggcggggttgcagtgctttgagcaggctcaacgggagatctgcttagcatggaacaaccgcttaacatgagtgctaacaaacagatcggtaaagcacgcatagtatttcctcaatgaataaaaaacagggcgttattgaatcaggtgcttgcataaatgacaagacgggcgtgaagcccgtcctgaatgatattacggtgagaaaagattaccagcctttcacggcaccgccgttaaagatcttgttcgctgcttcgtaaacttcatcgctctggtaagcctgaacgaattttttcacattctcagcatctttattgtcttcacgcgccacaatcaggttcacgtaaggagactctttaccttcaacaaagatgccgtctttcgccggggtcaggccaatctggctggcgtaagtggtgttgataacggccagcgcaatctgcgcatcgtccagggaacgcggcagctgcggcgcctccagttcaacaatcttcaggtttttcgggttctcgacgatgtccagcgaggtcggcagcaggcccacgccgtctttcagtttaatcagacctacctgctgcagcagcagcagggaacgaccgaggttagtcggatcgttagggacggcgatctgggagcccggctgcagttcgtccagcgatttgattttcttcgaataacccgcgatcgggtagacgaaggtgttaccgacggccaccagcttatagccgcggtctttaatctgctgatcgagatacggtttatgctggaaggcgttcacgtcgatatcgcctttgctcagcgcttcgttcggcagaacgtaatcgttgaaggtcaccagttctacgtcaaggccatacttctcttttgctactttctgcgcaacttcagcgacctgctgttccgccccgacgataacgccgactttaatatgattcggatctttttcatcctgaccgcaacccaccagcgccagagaaccgattaacgcgccaactgccgcaaaagttttgaaattaaaggccatgttatttccttcctgtaagaatgagtgttgtctgccaataacgttatttgtgagtcacagcccggacgatgcgatcgccagagaattgaattaaataaaccagaacaaccagcaataccagtacggtattcatcacggtggcgttatatccaatatagccatactgataaccaatctgacccaggccaccggcgcccaccgcgccgcccattgcggaataacccaccagcgtgatgagcgtgatggtggcggcgttgaccagacccggcaatgcttcaggtagcaggactttgcgcacgatctgcagcggcgtggcacccatcgcgcgggaggcttcaataaggccggtggggatctccagcagggcgttctccaccatgcgggcgataaacggcgcggcgccaactgttaatggcacaatcgctgcctgcaggccgatagaggtaccgacgatcacgcgggtaaacggaatcatccagaccagcaggataatgaacgggatggagcggaaaatattcaccagcgccgacagcgtgcggtacagtttggcattggcgacgatttgccccggacgggtaacgtacagcagcacgcccaccggcaggccgaggacaaaaccgaagaagccagagacaaaagtcattgccagcgtttcccatacgccgcgcaacagcagccacatcattgcctcagacataacccaatacctctacttttacatgatgttcctgcagccaggcgatggccgcctgagtgtcttcctgtgtaccgtgcatttcggtgagcatgatgccgaacttcaccccgccggcataatccatctgcgcgctgataatgttgttattcacattgaagcgacgcgcggtttcagagagcagcggcgcatcgacggagtggccggtaaattccatgcgcagcatcggtacgctatccgctgtggcggtaggtttcaggcgcgcctgatagtcatccggaatatcgaggtgcagagtggactgaataaactgctgagccagcggcgtcttcggatgggagaagacttcgctcacggtgtcctgctcgatcagttgaccattactaatgaccgccacgcagtcgcagatacgtttaaccacgtccatttcatgggtgatcaacaggatggtcagccccagacgacggttaatgtctttcagcagttcgagaatggaacgggtagtggccggatccagggcgctggtggcttcatcgcacagcaatactttaggattgctggccagcgcgcgggcaatcgccacgcgctgtttctggccgccggagaggttggccgggtagctgtcgtgcttatcacccaggccgacaagatccagcagctccgtgacacggcgtttgatttcagcctgcggcgtgttatccagctccaggggtaatgccacgttgccgaaaacggtccgcgaggccaacaggttaaaatgctggaaaatcatgccaatttgacggcgagcgcgggttagctctttctccgacagggcagtcagttcctgaccgtcaacctgtacgctgccctcggtcgggcgctccagcaggttcacgcagcgaatcagcgtacttttaccggcgccggaggcaccgatgacgccgtaaatctgtccggcagggacatgcaggctgacgttattcagcgcctgaatgctgcgattcccctgctggaatactttggtgatattggaaagtttaatcatcagttatttattatcgtttagccgtttgccgtggcattttcttctgccgtatccaggcgatgcctggcaatgaaatggatgttaaggcatccagacgtctaaatcaatctgactctttataatgagcactttcttgcatgcggaaacatgcgatactagcggcactagtctttttcaggagcaaaccggtggcaaagtcagtacccgcaatttttctcgaccgtgacggcactattaatgtcgatcatggctacgtccacgaaatcgacaattttgaatttatcgatggcgtcattgacgcgatgcgcgaactaaaagagatgggctacgcgctggtgctggtcactaaccagtccggtattgcccgcggtaaatttaccgaagcccagtttgaaacgctgaccgaatggatggactggtctctggcagaccgcggcgtcgacctcgacggtatctactattgcccgcatcacccgcagggtgcggttgaggagtaccgccagacctgtgattgtcgtaaaccgcatccggggatgctgatttccgcccgcgattatctgcatatcgatatggctgcttcttatatggtaggggacaaactggaagatatgcaggcggcagcggctgcggatgtcgggactaaagtactggtgcgcaccggtaagcccctgactgaagaagcggaaaaagcggcgaattgggtgctaaatagcctggcagagctgccggcggcgattaaaaagcagcaaaaataagcgttgcgtttaaaagatgagcggttgaaataaaattgtatttttccgcttgtcattcccggagagctccctataatgcgcctccatcgacacggcagatgtgaatcacttcacacaaacagccggttcggttgcagagaaaaatcctgaaaaacgggttgactctgaaagaggatagcgtaatatacgccacctcgcgacagagcgctaaagcgcgtcgcaactgctctttaacaatttatcagacaatctgtgtgggcactcaaagtgacatggattcttaacgtcctcggacgaaaaatgaataccaagtctcaagagtgaacacgtaattcattacgaagtttaattctttgagcatcaaacttaaattgaagagtttgatcatggctcagattgaacgctggcggcaggcctaacacatgcaagtcgagcggtagcacagagagcttgctctcgggtgacgagcggcggacgggtgagtaatgtctgggaaactgcctgatggagggggataactactggaaacggtagctaataccgcataatgtcgcaagaccaaagtgggggaccttcgggcctcatgccatcagatgtgcccagatgggattagctagtaggtggggtaacggctcacctaggcgacgatccctagctggtctgagaggatgaccagccacactggaactgagacacggtccagactcctacgggaggcagcagtggggaatattgcacaatgggcgcaagcctgatgcagccatgccgcgtgtgtgaagaaggccttcgggttgtaaagcactttcagcggggaggaaggcgttaaggttaataaccttggcgattgacgttacccgcagaagaagcaccggctaactccgtgccagcagccgcggtaatacggagggtgcaagcgttaatcggaattactgggcgtaaagcgcacgcaggcggtctgtcaagtcggatgtgaaatccccgggctcaacctgggaactgcattcgaaactggcaggctagagtcttgtagaggggggtagaattccaggtgtagcggtgaaatgcgtagagatctggaggaataccggtggcgaaggcggccccctggacaaagactgacgctcaggtgcgaaagcgtggggagcaaacaggattagataccctggtagtccacgccgtaaacgatgtcgatttggaggttgtgcccttgaggcgtggcttccggagctaacgcgttaaatcgaccgcctggggagtacggccgcaaggttaaaactcaaatgaattgacgggggcccgcacaagcggtggagcatgtggtttaattcgatgcaacgcgaagaaccttacctggtcttgacatccacagaacttagcagagatgctttggtgccttcgggaactgtgagacaggtgctgcatggctgtcgtcagctcgtgttgtgaaatgttgggttaagtcccgcaacgagcgcaacccttatcctttgttgccagcggttcggccgggaactcaaaggagactgccagtgataaactggaggaaggtggggatgacgtcaagtcatcatggcccttacgaccagggctacacacgtgctacaatggcatatacaaagagaagcgacctcgcgagagcaagcggacctcataaagtatgtcgtagtccggattggagtctgcaactcgactccatgaagtcggaatcgctagtaatcgtagatcagaatgctacggtgaatacgttcccgggccttgtacacaccgcccgtcacaccatgggagtgggttgcaaaagaagtaggtagcttaaccttcgggagggcgcttaccactttgtgattcatgactggggtgaagtcgtaacaaggtaaccgtaggggaacctgcggttggatcacctccttaccttaaagaatctgcctttgcagtgctcacacagattgtctgatgaaaaacagcagtaaaaacctctacaggcttgtagctcaggtggttagagcgcacccctgataagggtgaggtcggtggttcaagtccactcaggcctaccaaatttgcgaagcaaatttgaagaggttgcaaacgatggggctatagctcagctgggagagcgcctgctttgcacgcaggaggtctgcggttcgatcccgcatagctccaccatctttactgcgaacacaagaaaacttcagagtgaacctgaaaaggtgcactgcgaagttttgctctttaaaaatctggatcaagctgaaaattgaaacgacacacagttaatgtgtgttcgagtctctcaaattttcgcgacacgatgatgttttacgaaacatcttcgggttgtgaggttaagcgactaagcgtacacggtggatgccctggcagtcagaggcgatgaaggacgtgctaatctgcgaaaagcgtcggtaaggtgatatgaaccgttataaccggcgatgtccgaatggggaaacccagtgcaattcgttgcactatcgttaactgaatacataggttaacgaggcgaaccgggggaactgaaacatctaagtaccccgaggaaaagaaatcaaccgagattcccccagtagcggcgagcgaacggggagcagcccagagtctgaatcagcttgtgtgttagtggaacggtctggaaagtccgacggtacagggtgatagtcccgtacaccaaaatgcacaggttgtgaactcgaagagtagggcgggacacgtggtatcctgtctgaatatggggggaccatcctccaaggctaaatactcctgactgaccgatagtgaaccagtaccgtgagggaaaggcgaaaagaaccccggcgaggggagtgaaaaagaacctgaaaccgtgtacgtacaagcagtgggagcaccttcgggtgtgactgcgtaccttttgtataatgggtcagcgacttatattctgtagcaaggttaaccgtataggggagccgcagggaaaccgagtcttaactgggcgttaagttgcagggtatagacccgaaacccggtgatctagccatgggcaggttgaaggttgggtaacactaactggaggaccgaaccgactaatgttgaaaaattagcggatgacttgtggctgggggtgaaaggccaatcaaaccgggagatagctggttctccccgaaagctatttaggtagcgcctcgtgaattcatcttcgggggtagagcactgtttcggctagggggtcatcccgacttaccaacccgatgcaaactacgaataccgaagaatgttatcacgggagacacacggcgggtgctaacgtccgtcgtgaagagggaaacaacccagaccgccagctaaggtcccaaagtcatggttaagtgggaaacgatgtgggaaggcacagacagccaggatgttggcttagaagcagccatcatttaaagaaagcgtaatagctcactggtcgagtcggcctgcgcggaagatgtaacggggctaaaccatgcaccgaagctgcggcagcgacactatgtgttgttgggtaggggagcgttctgtaagcctgcgaaggtgtgctgtgaggcatgctggaggtatcagaagtgcgaatgctgacataagtaacgataaagcgggtgaaaagcccgctcgccggaagaccaagggttcctgtccaacgttaatcggggcagggtgagtcgacccctaaggcgaggccgaaaggcgtagtcgatgggaaacaggttaatattcctgtacttggtgttactgcgaaggggggacggagaaggctatgttagccgggcgacggttgtcccggtttaagcatgtaggctgattgtccaggcaaatccggataatcaaggctgaggtgtgatgacgaggcactacggtgctgaagtaacaaatgccctgcttccaggaaaagcctctaagcatcaggtaacatcaaatcgtaccccaaaccgacacaggtggtcaggtagagaataccaaggcgcttgagagaactcgggtgaaggaactaggcaaaatggtgccgtaacttcgggagaaggcacgctggtgtgtaggtgaagtccctgcggatggagctgagaccagtcgaagataccagctggctgcaactgtttattaaaaacacagcactgtgcaaacacgaaagtggacgtatacggtgtgacgcctgcccggtgccggaaggttaattgatggggttatccgtaaggagaagctcttgatcgaagccccggtaaacggcggccgtaactataacggtcctaaggtagcgaaattccttgtcgggtaagttccgacctgcacgaatggcgtaatgatggccaggctgtctccacccgagactcagtgaaattgaactcgctgtgaagatgcagtgtacccgcggcaagacggaaagaccccgtgaacctttactatagcttgacactgaacattgagccttgatgtgtaggataggtgggaggctttgaagcgtggacgccagtctgcgtggagccaaccttgaaataccaccctttaatgtttgatgttctaacgttggcccctgaccggggttgcggacagtgtctggtgggtagtttgactggggcggtctcctcccaaagcgtaacggaggagcacgaaggttagctaatcctggtcggacatcaggaggttagtgcaatggcataagctagcttgactgcgagcgtgacggcgcgagcaggtgcgaaagcaggtcatagtgatccggtggttctgaatggaagggccatcgctcaacggataaaaggtactccggggataacaggctgataccgcccaagagttcatatcgacggcggtgtttggcacctcgatgtcggctcatcacatcctggggctgaagtaggtcccaagggtatggctgttcgccatttaaagtggtacgcgagctgggtttagaacgtcgtgagacagttcggtccctatctgccgtgggcgctggagaattgaggggggctgctcctagtacgagaggaccggagtggacgcatcactggtgttcgggttgtcatgccaatggcactgcccggtagctaaatgcggaagagataagtgctgaaagcatctaagcacgaaacttgccccgagatgagttctccctgagactttaagtctcctgaaggaacgttaaagacgatgacgttgataggccgggtgtgtaagcgcagcgatgcgttgagctaaccggtactaatgaaccgtgaggcttaaccttacaacgccgaagatgttttggcggatttgagagaattttcagcttagattcagagttgagtacgcaatataaagaattgcgtactgagcacaaagaatttgcctggcggcactagcgcggtggtcccacctgaccccatgccgaactcagaagtgaaacgccgtagcgccgatggtagtgtggggtctccccatgtgagagtagggaactgccaggcatcaaattgcagtaagccggggtgacaaccggtggtaataaagcgaagaaattcggtggagcggtagttcagtcggttagaatacctgcctgtcacgcagggggtcgcgggttcgagtcccgtccgttccgccacttattaagagccctgagcatttgctcagggcttttttgtttgatctgttctctattattgctaattcagcaaaaatcctctgcattaatcgctctttttcccctccacaccatcagccataatttcatccgttaaccgaaatgaagaaataacgaggaaaatcatggcaatccctgcatttggtcttggcaccttccgtctgaaagatgatgttgttatcgcatccgtaaaaaccgcgctggagctgggctatcgtgctatcgacaccgcgcaaatctatgacaacgaagccgcggtgggtcaggctatcgccgaaagcggcgtgccgcgtgatgagctgttcatcactaccaaaatctggatcgagaacctgagcaaagacaaactcatcgccagcctgcaagaaagtctgcagaagctgcgcacggactatgttgacctgacgctcatccactggccatcaccgaacgatgcggttgccgttgaagagtttatggcagccttgatggaagcgaagaagctgggtctgacccgtcagattggtatctccaacttcactattccactgatggagcgcgcgattgccgccgttggcgctgaaaacattgcgaccaaccagattgaactctcgccgtatctgcaaaaccgtaaagtcgtcgactgggcacgtgagcacggcatccacatcacctcttacatgacgctggcttatggtaaggcgctgaaagatgaagtgattgcccgtatcgcggcgaaacataatgcgactccggcgcaggttatcctggcatgggcgatgggcgaggggtacgcggtgatcccgtcctcgacgaagcgtgataacctggccagcaacctgaaggcgctggatctgcagttggatgatgaagatcgacaggcgatcgctgcgctggattgcaacgatcggctggtgagcccggaaggtctggcgccgcagtgggattaatcactcgctaccggtatgccgttcgccctgccgcccgagatggtattacgacagctccttcgggagctgttttacgtggtcgctcagaaaatcaataaatgccctgatgcgagtgctgaccgcccggtcgctgtaatagacggcactgaaaggcatttccaccggtaagcgcttatcggccagtagctcgacaaactctccgctggcaatctctttatccaccatgtaatccgacaggcaggcaataccgttgccggtcaggcacagctgcttgagcgtttcgccgctattggatgacaccgccgcttcgatctctaacagctggccatcgcaacaggagaccggccaggtattcagcgataccggttcggtgaagccgaggcagtgatgctgtttcagatcggacggatgctgcggcataccgtagcgcgcgacatagtcgggcgaggcgacgatcttacgatagctggtaaacagcggtcgggcgcgcaggctggaatccgttaaggtcccggcccgaatggccacatccactttccgttcaatcagattgataaacgtctcagacgagacgagcgacagcgtcatttccgggtagcgctcgcgaaatggcttcaccagcggcatgagaaaatgcagcatcaccggcgtcgcggcatctacccgcagcaggccccgcggcgtcgtgcgcgtctccagcagatcgttctctgccgccgccatttcctgcaagaccacctgcatccggcgaaagtagcgctcgccttcttctgtcaggctgagctggcgggtggtccgattgagcaggcttacgcctagctttgattccagctttttgaccgcccggctgacggcggagttggcctgtccgagctgctcggccgcccggctgaaactcccgctttccaccaccgccacaaagatggcgatctcctctgatgtggctctcattattgcacctatagcaaaattctattgatactttgatggtttttgttatttatacaacccttcatactacgtgtcatcttaatcctgatgctacggagtaaattatgccactggcgctatttgccttaaccatcggtgccttcgcaattggcaccactgaatttgtgattgtcggcctggtcccgaccattgctcagcaactctctatctccctgccttcggcgggactgctggtctctatctacgcgctgggcgtggcgatcggcgccccggtactgacggcgttgaccgggcgtatgccgcgtaaacagctgctgctggcgctgatggtgctgtttacggcgggtaacatactggcctggcaggcccctggctatgaaacgctgatcctggcgcgactgctgactggtctggcgcacggcgtgtttttttctatcggctcgacaatcgccaccagcctggtggcaaaagagaaagcagcctcggccaccgccattatgttcggtggcctgacggtcgcgctggtgaccggcgttccctttggcacctttattggccagcatttcggctggcgggaaaccttcctcgcggtatcgattctcggggtgattgcgctaatcagcagtctgattctggtgccgaataacattccgggccgcgccagcgccagcctgcgcgatcagctgaaagtattaacccatccgcgcctgctgatgatctacgccattaccgcgctgggctatggcggcgtgtttaccgcttttaccttccttgcgccgatgatgcaggagctggccggcttcagcccgtcagcggtgagctggctcctgctgggctatggtgtctctgtggctataggtaacgtgtggggcggcaaactggccgataagcatggcgccgtctccgcgctgaagtttatcttcgctgcgctggttgtgctgctgctggtcttccagctgaccgccagcgttcactatgccgcgctggcgacagtgctggtgatgggcgttttcgccttcggcaacgtgccgggtctgcaggtctatgtggtgcaaaaagcagagcagtataccccgggggctgtcgacatcgcttccggcctgaatattgccgcctttaacgtcggcatcgcgctggggtcgatcgtcggtggacagacggtcgagcggtacggtctggcgcagacgccgtggattggcgcgatgattgtgctggtcgctttgctgttggtggtcctgagcggacgtttagataaattgccacgccgttcggcagcgctttctcccgaaggctaagggtttctcgcaatttgcattgaaagtgtatgggaaaatccctataacagaataaccagtcgtcgtcgggctggtttctgttatcgaggattaatgcccaaattgcgaaagaacacctacgccatgcgctatgtcgccggacaacctgcggagagaatattgcctccgggggcgtttgcgggcgtgagtccggtttatcccgccggtacgccattaagcagcgatgagaagatccgcgtgctggtatggaatatcttcaagcagcagcgcgcagagtggcagtcggtcctcaaaaatttcggcaaagatgcgcatttggtcctgttgcaggaggcgcaaactaccccagaactggtccggttcgcgacttcaaactatctggccgccgatcaggtgccggcgctggtattgccgcagcatccttccggcgtaatgacgctggcctccgcgcaccccatctattgctgtccgctgcgcgagcgcgagcctattttgcgattgccgaaatcggcgttagtgaccgtttatccgctgccggatgcgcggttgttgatggtagtcaatatccatgccgtcaactttagccttggcgtcgacgtctacagcaaacagctgctgccaattggcgatcagatcgcccatcacagcgggccggtgatcatggccggcgacttcaatgcctggagccggccgcggatgaatgcgctgtaccgctttgcgcgtgagatgtcgttacgcgaagttcgtttctcagacgatcagcgccgccgcgcgtttggtcgtcccctcgattttgtgttctaccgtgggttaagcgtgcacgatgcttccgtgctggtgacccgcgcctccgaccacaacccgctactagtcgaattcagtcccggcaagcctgattaatttaaggttggtcaggcctgccatggggcaggcctgcgcatgcatggtgctgccttttattactcaaaaaaaaccgtaaggacaagacaacatgacaacacgctctcaccatgacaacgtcgaaaagcagttcggctcccaggccagcgcctatctgaccagcgccgtacacgcctctggtcgcgatctgcagcggctggcggaacggctggctgattttcctcaggcgaaagtgctggatatgggctgcggggcagggcacgccagttttaccgcggcgggacaggttgccgaggtgaccgcctatgatttatcgagccagatgctggaggtcgttgccgccgcggcaaaggagaaaggttttagcaatatcgtgacccagcaagggtacgccgaaacgctgccgttcgctgatgtcagctttgatgtggtgattagccgctactctgctcaccactggcatgacgttggccaggcgctgcgtgaggtgaaacgtgttctcaagccgggcggggtgattatcatgatggacgtgatgtcgccgggtcatccggtacgtgatgtctggctgcagacggtggaagccctgcgcgacacctcgcatgtgcgtaattattccagcggcgagtggttgacgctggcgactgaagcggggctggtggttaaccagttgttgaccgatcgcctgccgctggagttcagttcatgggtggcgcggatgcgtactcctgagccgctggtggaggcgattcgcttatatcagcagagcgcttcggcggaggtcaaagcgtacttcgagttacaggaggacggatcgtttaccagcgataccattctgttcgaagcgcataaagcggtttaatttaggcaacaaaaaaggcaccggggaagtcggtgcctttttgtcgaaccagaggtatcaggactctggtcgatcgttatttttcacaaacaacgttagctgatcgcctgggcgcaggttgtcggtatcgctgttccagcgcatcacgtcgcgaatattaacgccgtgacgtttggcgatgctcgacagcgaatcgcctttacgaacgcgataggtgatgctatcgctgttgttcgccagacgctgggcgctgctgcctgcgccaataaccagattctgcccaacctttaatccagagccgcgcaggttattccactgctgcagatcgcgggtcgtcacaccaagacgggaagcaatcccggaaatggtgtcgccggaacgcaccttatagctacggctggtcagcggcgtattgtccgcgagctgcgtcggctgcacggcggcaatgtcgccagaggccagcgattcacgcagctgtgcggcgtgcttctgcggcaccatgacgtactttggcccgctcgcgcccagcgttgacccttttacgcccgcattgaacgtcttcagcttgctgaccggcataccggccatgtccgcgagctgagaaatatcaaccggactgtcgaggcgaacgcgcgccagcgcacggctttcatcagccgtaggcagctttacgccgtaacgtttgctgtttttgagaatgtcgctcaatgccagcattttcgggacgtagattttcgtttcatgcggcagagacagcgaccagaaatcggtgggtttgccacgcgaacggttcgcttttactgccttcatgacccggccttcgccgctgttataggctgcgaccgttaacaaccagtcgccgtcgaacattttgttcagacgttgcatcatgtccagcgccgcggtagtagacgcgacgacatcacgacgcgcatcgtaactgcgggtctgttttaaaccataattgcgccctgtgctcggaatgatctgccaaatgcctgcggcattggcgccagacgtcgcgtgtgggtcaaaagcgctctccactatgggtagtaataccagttccattggcatgttacgtttcttaacctgcccggctatccagtacatatacggctctgcccgtaaagttacatcgtggagatagctcttatttcttaagtacttctgtttctgttcgcgaatccggggattatccggtattcccatctttagctcgtcgcctatggaagtccacagatcctggtcttgcgcgtagaaggttccatcatctaaccagcgcgcttgacttgtgaacttgcctgcttccccttgaccagccgcagaaaggctctgtgctcgctgttcgacggtgccatcgtgcttagacgcctggcaccccaccagcaggacagaggcgagtaatatcgctcgtgccttcatgtgtgtgtcaatagttgcttaaaagacgaccaaggataacggcgaagttggccgatgacaagaattaaatatcagaagtcatctttctttgaccttaaccatgcaaatcgcgccacagagtgttgcaaatttgtttctttgttaattttgtcaattaaatcaatatcatttacgcgtaaaaataaatttatacgccgctcatttttcagagttacgggtagtgttttttgtttttttgcacgtaactcattaactttatgatagtaatcgtttatgtccctatcatctggcaggatactcaatgcaaacttcatattcgctaacgtatattcatgtgcgcaacatatgagggtttcttcaggaagggcattaattttcataaatgattgatacatctgctctgctgtaccttcgaacagccttccgcagccgccggaaaacatcgtatcgccacagaacagataaggttcgctgtagtaacagatatgtcctaatgtgtgacctggcgtagagaaaatggaaaaatcgtgcccgagaattgacagccgatcgccatcgcctaccacctgagtgacgcctttatcctgggtttccgccggcccgtaaaccactatagaagggaatttttcacgtaattgttttacgccgccgacgtgatcctgatgatgatgggtcaataaaatagcctcgggctgccactggttttcctcgatggccgccagaaccggcgcggcttcgcctggatctacgatgatgcagcggccgttattctcactgagaacccagatgtagttgtcctgaaacgcgggaatactgataagattcataaattacctctaaagcgtagcggaaggtggcaatgaagccggcaaggatacctcacacagtgacagcgcctgagcattggtccagtatgccgtggggcgaatactatcgcgaaacgctggagcagcagatgaaaccgtggctggctaaattatatggctttcatctgcttaagattggcaatctgagcgcggaaatcaataccgaagcttgcgccatctcgcaccaggtgaatgtctcgctggcgggaaatccaatgcaggtccgggctgacccgctgcatttaccctttgccgaaaagtccgttgacgcctgcctgctggcgcacaccctgccgtggtgtagcgatccgcatcgtctgctgcgggaagccgatcgtgtactgatcgatgatggctggatgatcctgaccgggtttaatccggtcagcctgatggggttgcgtaagctggtgccggtcctgcgcaaaggaacgccttataatagccgtatgtttacgctgatgcgccagctggactggctggcgctgctcaactttgaagtgctgcactatggacgttaccaggttttgccctggtcgcgccatggcggcaaattgttgagcacccatctgccggcgctgggctgtttgcaattgattgtcgcccgcaaacggaccattccgctgacgctcaatccgatgaaatccggcaaagcgaaaactcagctgcggccggcggtgggcgccacccggcagtggcgcaaagggcagaattaactctcaggcaggtagccgacatcgtccagtgtggggtgggaggccgccgcgcgcgccagctcgtcgcagcgttcattttcaggatggccggcatggccctttacccattcccatttaattttatgctggccaagcgcggcgtccagccgctgccagaggtcgacatttttcaccggctttttctctgccgttttccagccgcgctttttccagttgtggatccactgggtgatcccctgacgaacatactggctgtcagtgctgagcaccacttcgcaatgctcttttaacgcttccagggcaacaattgccgccatcagttccatgcggttattggtggtcagacggtagccagcgctgaaggttttttcgtgctggcggtagcgcatgatggcgccgtagccgccaggtcctggattacccaggcaagagccgtcggtgaaaatttctacctgtttgagcatctctggtagacttcctgtaattgaaatcgatttgtaaacgataagtctgacataaatgaccgctatgagcactgcaattacgcgccagattgttctcgataccgaaaccaccggtatgaaccagatcggggcacactacgaaggacacaagatcattgagatcggcgccgtggaggtgatcaaccgccgcctgaccggtaacaattttcacgtctatctgaagcccgatcggctggtggatcctgaagcattcggcgtacacgggatcgccgatgagttcctgctggataaacctacctttgccgacgtggctgatgagtttatggattacatccgcggcgcggagctggtgatccataacgcctcgttcgatatcggctttatggattatgaattcagtaagctaaaccgcggcatcggaaaaaccgagaccttttgtaaaatcaccgacagtttggcgctggcgcggaaaatgtttccaggcaagcgcaacagcctcgatgcgctatgttcgcgttacgaaatagacaacagcaagcgtacgctgcacggggcgttgctcgatgcccagatccttgccgatgtctatttgatgatgaccggcggccagacttcgatggcgttctctatggaaggcgaaagccagcagcaggcgggagagatgggaattcagcgcgtcgtccgcgccggcagtcagttacgcgtggtttatgcctcagatgaagaactggcgaaccatgaatcccgcctcgacctggtacaaaagaaaggcggaagctgcctgtggcgtgcctgatagccactaaaatgaattaaaagtaggcggttgggtgatttttgcagcaaacgattcaaaatggtagaaaaagcgttgacggggtagaggggaatccgtaatattcgcctcgttcccaacggaacaacaacgcggagcggtagttcagtcggttagaatacctgcctgtcacgcagggggtcgcgggttcgagtcccgtccgttccgccactattcagaaagcctgaatcagcaatgattcaggctttcgtcgttttcgtcgccgaatttcagcgcgcctcttgttcctcctgcatgcactgcataaatacccgcatcgccggactgatagccttcccggcatggtgggcgcagagcgcatggatcgtcaacggcgtctcgctgaatggcagctcaaccagcgtcccgcgcttgagctcgtcctccaccgcaaagcgtggcagaaaactcactcccagatttcccgccacgcactgcttgatactctcaatactccacagctcaatggtgttctccagagtaatttcgcgctggcgcagggtgctttcaaaaatctgccggaacacgcactggggttcgttgatgataaagctcagcgggatatgctgccgcgggcgcatgaagtctaccggcgcctgctcgaccgatgcgaccagcgccagcgactgctggccaagctccattatcgtgagcgcgtcatcgttacccacccggtaaaacacccccaaatcgacctcgtcggcaagcagcgcatcgcggatgctgtagcagttgagcgactgcagcgacaggcgcactttcggagcgcgttgcttaaaacgctgcagcacccgcggcattttatacgccagcagcgtttcgccagtggcgacgcgaagttcgccgccgggctcatcgtcctggcgtgccgcctgacgaatcgaggccatcactttagtcaggtcgtagacatgcggcaggaccttcttaccggcggcggtgagacacatccgccggccgattttctcaaacagcgggatggcaagctcctgctccagctgctggatatgaaaagtcacggtggactgagtgcagcatagtttctgcgccgcgcgcagaaaggaaccttcttcgacaacagttttgaaggtgatgaagcgtcgcagatccatatttcctctttgtatcgatattatcgaagcgagaatgaaaaaatattcatttttttaaattatcagcttcgggtagtgtctgccagacaagaggagaaaacccgtgacacctaccctgattagcgcctttttaacttacactttgatcaccgccctgacacccgggcccaacaatatcctggcgctgagcagcgtcacctcccatggtctacgccgcagcctgcgggtgctggccgggatgagcgtcgggtttattatcactatgttgatttgcgcggctttaaccttttcgctggttgaactcgactcacgctttaccctggtattgggatggattggcgcggcgtacatcctgtggctggcctggcagattgccaaaagcaaaccggcgacagggacgccgagtgtagaaccggtaggcttttgggcgagtctggggctacagttcgtcaacgttaaaattattctgtatggcatcaccgcgctttctacctttgttctgcccgttactcgcgagcctgtttggcttatcagcgtgagtctgctgctggcggcgattggcgcgctgggaaatctgtgctgggcgctggcggggcatctgtttcagcgcctgtttttgctgtacgggcggcaactgaactggatgctggcagcgttattggtctactgtgctgtgcggatcgtggtggaataaaaagggagcgcagcggctcccgaagggtgattagccgatcgtgaaaggatcggcatcgcgccaggcggggaatttttcacgatattcctgaagggcgctcagcgacagctcggcatcaagacgagtggcctgatgcggatcggcggtgacgataatctccccctggggattgataatccgactatcgccgcggtaatgatggccgttgccgtcagtgccaacccggttacagccggcgacataggcctggttttcaatcgcgcgggcgatcagcagcgactgccagtgcagcgagcgtggcgccggccagttggcgacatacagcgccaaatcatagtcgttctgattacgcgaccataccggaaagcgcaggtcgtaacagaccagcggcaggatccgccatccacgccattcaaagaccacgcgctggtttccggcctcatagtgatgatgttcatcggccatacggaacaggtgccgtttatcataatggtgcaccgtaccgtcaggctcgaccagcaggaagcggttaacagcgccgtgttcagtttgcagcgcagcgctgccggcaatcagcgcctgggattgcgcagcccgggcatgcatccactccaccacgtcggcctcgggtaaagactgttttgccgcttccatggcaaagccggtggtaaacatctctggtaaaacaatcacatcgcgcccggtgattccttccagttggcgatcaaaatggcgcaggttggcagggccgtccatccagaccagcggttgttgcaacagcgaaattttcaggccaggcacaatggtcaactccattctcatgagggggttaggttaactgtaacaccatatcagccgcgcggcggtccgcggaatattttgttaaaaaaatgctactgatggaaacgaaaggggaggagagggcgaaaaaaaggcggggaaagttccccgcccggcgtgtgatgtggtagtggttttattatgcagcttcaactttacgaactttttccggcagctttaccggctttgtcgccagctcctctggcgcaaagtcgtcgacgttaatgctgcgcagacggctatgctctgcacgggtaagaatggcggcctcatcctgactgattaatcctttggccagcgcgttgtgggccagctcatccagacgggtgaacggcagatttttacccaactctttgcagatccgctggtggataggatcggccgccatcacttccagcagggcctcttccagcaggcctaccgggttatgctcgctcggcgtcagatactgaccgcgaccgatgcgggagcgcgtggcgctgggcacctgcagaattttggcgacctggtggtccagcctatccgacggcgcatgatgatgacggccggtcgggaagatgaccaggcgcattacgcctgccaccagacggttcgggaaattgtccaacagatcgtcaatggcttgctcggcctggtgcagcgcgtcctgtaccccccagtgaaccagcggcagatcggcttcattgcgtccttcatcgtcatagcgtttcagcaccgccgaggccaggtacagctggcttaacacatctcccagacgggcggagatacgttcgcgtcgcttgaggctgccgccgagcaccgccattgagacgtctgacagcagtgccaggttggcgctcagacgattcatttgctgatagtagcgacgggtggcgtcacgagtcggcgcgctgctggtgcgcccgccggtcaggcccagccagaaactccgcactttattactgccgacatggccgatgtgtttgaacagcagcttgtcataggcgttcaggtcattattctgcgcggcggccatctcctccagtacgtacggatggcagcgaatcgccccctgaccgaagatcatcatgctgcgggtcagaatgtttgcgccttccacggtgatggcgataggcgcgccctgataggcccgggcgaggaagttgccttcgcccagcataatgcctttcccgccggtaatatccatcgcgtcaataatggagcgctggccgcggtgggtgcagtgatatttcacaatagcggacagcactgcaggtttctcgccgagcatgatgccgtaggtgatcagcgacgccgcagcgtccatcacataggcgttaccggcgatacgcgccagcgcctcttcaatcccttccattttgccgatggagattttgaactggcggcgaatatgggcgtaagcgccagtcgccatggcaacggatttcagaccaccggtggcgttggacggcagagtaataccgcggccgaccgatagacattcaaccaacatgcgccagccctgaccggccatgcttgggccgccgatgatgtaatcgataggcacgaagatatctttgccgcgggttggaccgttctggaacggcacgttcagcgggaagtggcgacggccgatttccacgcccggggtggaggtggggatcagcgcgcaggtgatacccagctcttcttctccgcccagcaaacgatccgggtcagagagtttgaaagccagccccagcacggtggcgataggcgccagcgtgatataacgtttgttccaggtcaggcgcatccccagcacctgttgaccctgccagtcgcccatgcacaccacgccggtatccgggatggcgccggcgtcagagcccgcttccgggctggtgagagcgaagcaagggatttccaggccgcgtgccagacgcggcagataatgattcttctgttcttcggtaccgtaatgctgcagcagttcgcccgggcccagcgagttcgggacgccgacggtgatcgccaggatgccggagacgccagagagtttctgcagtactcgtgcctgagcgtaagcggaaaactcaagtccgccatactctttcttaatgatcatcgcgaagaagcggtgctctttcagataggcccacagctccggcggcagatcggccatttcgtgggtgatggcgaagtcgttagccatccggcaggcttcttcaactgggccgtcgaggaaagcttgctcttcggcggtcagccgcggctgcggatagttatgtaacttttgccagtcaggattgccgcgaaacagatcgccttcccaccaggtggtgccggcgtcgatggcttctttttccgtgcgcgacatcggcggcatcaccttgcggaatgtgcgaaacgccggtgcggaaatcatggatttacgcataggcgcaaagttaaacggcaacagtatgatcgccagcggcagcagcagccagatattccacactccggccgcgccgagcgccgcggtccaggcgagcaaaatcacgctgctgagcagcaggctgacccggtgatagaagagcgcgccgagtaaaacgacggttgcaacaatactcaaaatcatcatagagaaatgctccctgagcttgtaggaggtctgaccacttgtgatgtattggttgtagtgcatgcgtttttatttagcaatgtgtttacaaaataattacaaccttgctcacattgttgtatgcaaaagcggcacataaaatcaaaagagcgagggataacgctgcctgctgcttctcgcttcgacggctatccggtacactgccggggttattccactcatactgaaggattatcctcatgtaccaggatcttattcgtaacgaactgaacgaagccgcggaaacgctggctaactttctgcaggacgaagctaatatccatgctatccagcgtgccgctgtcctgctggcggatagctttaaggcgggtgggaaagtgctgtcctgcggtaacggcggttcccattgcgatgcgatgcattttgcggaagagctgaccggacgttatcgcgaaaaccgcccgggttacccggccatcgcgatctccgacgtcagccacctctcctgcgtgagcaatgattttggctatgaatatgtgttctcccgctacgttgaatccgttggccgcgcaggcgatgtgctgctcggtatctccacgtctggcaactccggcaacgtgattaaggccattgaggccgcgcgggcgcaggggatgaaagtgatcaccctgaccggtaaagacggcggtaaaatggccggtagcgctgatgtggaaattcgcgtgccgcactttggctacgccgaccgcatccaggagatccatatcaaagtgatccacattctgattatgctgatcgaaaaagagatggcgaaaggctaacaggcaggtgagtgtgtactgttgacggtggcctcgctccggcgccgtcgtgatttgtgagggtgaggtgatctatgtgcgaactgctcgggatgagcgccaatgtgccaaccgatatctgttttagctttaccgggctggtgcagcgcggcggcgggacggggccgcataaagacggctggggcatcaccttctatgaaggtaaaggctgtcgcacattcaaggatccccagccgagctttcagtcgccgatcgcgaaactggttcaggattaccccattaagtcctgttccgtcgtcgcccatattcgtcaggccaaccgcgggagggtggccctggagaacacccatcccttcacccgcgaactgtgggggcgcaactggacctatgcgcacaatgggcagctaaaaggctataagtcgctgaaaaccggtaattttcatccggtaggtgaaaccgacagtgaaaaagcgttttgctggctgctgcaccgtttaaccgagcgctatccgcgcacgccgggcaatatgctgggcgttttcaagtatatcgccaccctcgcgggtgaactacgtgagaaaggggtgttcaacatgctgctgtcggacgggcgctacgtaatggcgttctgctcgaccaatctgcactggatcacccggcgagcgccgttcggcgtggcaaaactgctggaccaggatgtggagatcgactttcaacgcgagaccacacccaacgatgtggtcacggttatcgccacgcagccgctgacggccaatgaaacctggcataagatcatgccaggcgagtgggcgttattttgtctcggggagcgtgtagtttgaggccagctgcggctggacaacctcgtggctgagcggcttgctcaccacatagcggccgtcggtcactgatacgaccggcggtttgtgggtctgctggaaatagtcatagccaggcttgagctgtttccagaaatccgcgtagtaggagtatttgtggcgttccatgttggcgttggtcatgcggaacggatagatactcacctgcacgcttggctggccgaagactaaagcgccggtcacgaactggaagatctcatcgataccgctgtcggtcatggcgtagcagccgactgagacgcagtcgccgtggatcatcaggtatttcccttcataaccatgggcgcgatcgtaggcgttcgggaagccgatgttaatcgctttatagaagcggctgtcgggtttgagctggctgcgggtgacgttatagaacccttccggactcttgaaatcgccctggcgctgtttcggaccgaggccaccggagtagttgcagatccggtagctgtcgaggagctggtaggtctcacccattttgacgtaaaggtcgagcatgcgctcttctttaaagatctcaatgtaaaccggtgaacccattaattgctgcttatattctttgcttaccggcgttgtcgggctgttgctgctgagcagcccggcaaatgacacgcacggcaacagaagcatcgcaataaataatgcgattttgcgcatactgcttgttccttgataaaacaaaatagccacattgccaggacggcaagagagacccgaaatcagagttttctggatttagagcgctcacattagcatcacggcattttttcgcaagggcgacgtggcggcgtttacaaatcagcctcactttataccctgccagcgacgaaaacacagtgagaactttgcgcaatagctcgcattttagaagcacttatcgccccttgcgctacagccgccgctcacgaaatgttacacttgcgccggttcatcatcagagtaagaaaggatgcttctcttccgtcctgagcgctactggcgccgtttcgccctttcttctctgccattctgtcaataagctggccctgacctgcgtcggggttgaggttacggatacctgctaacgatatgattaaaatcacgaaagggctggatttgcccatagctggcatgccattacagcagatttctcccgcgccagcggtgaagcgcgtcgcgctactcggcgaagagtacgttggcatgcgccccgcgatggcggttaaagaaggcgatcgggtcaaaaaaggtcagatcctgttcgaagataaaaagatccctggcgtctgctttaccgccccggcgagcgggatcgtcagcgcgatccaccgcggcgaacggcgcgtgttgcagtcggtggtgattgatatcgagggcaatgacgcggtggcgtttacccgttacgccgcggacgcgctggccgaactgccgcgcgacaccgtacagcagcagctgctggcgtcgggccaatggacggcgctgcgtacccgaccgttcagcaaaacgccgctcccggggagcacgcccgccgctatctttgttaacgccatggacaccaatccgctggcggcggagccgcagccgattattctggccgaacgtgccgccttcgacgccggtcttaccgtgctcacgcgcttgaccgacgggaaagtgcacgtctgccagcccagcggcggcaagctgggcggtcatcctctcggccaggtttgtttcaatcagttcagcgggccgcacccggcggggctgccgggaacgcatattcactttctggagccggtgagcctgaataagcaggtctggcacctcaattatcaggacgcgatcgccattggtaagcttttcctcgacggggagctctactgcgaacggataattgcgctcggcggcccgcaggtaacatctccgcggctggtcaaaacgacgctcggcgccagccttgaggatctgctggcaggtgagttgcaggagggggaaaacagggtcatttccggctcggtgcttagcggcgcccgcgcccatggccctcacgccttcctggggcgcttccatctgcaggtgagcgtggtcaaagaagggcgggaaaaagagctcttcggctgggtgatgccgggcaaagagaaattctcgattacccgcaccacgctgggccatttcttcaagcgcaagcgctttcatttttccaccgataccaacggcggcgagcgggcgatggtgccgatcggcaactacgagcgggtgatgcctctggatatcctgccgaccatactgctgcgcgatctgctggccggagacaccgacagcgctcaggcgctgggctgtctggagctggatgaagaagatctggcgctgtgcacctatgtttgccctggaaagtatgaatatggcccggcgctgcgcagcgtgttaacccggattgagcaggaaggataagagatgggcttaaagcacctgattgagaaacttgagccgcatttcacgcatggcggcaagctggaaaaatattacccgctgtatgaggcggcggcgaccatcttctacacgccgggccaggtaacccgcggcgcggcgcacgtgcgcgacgccatcgacctgaagcggatgatgatcctcgtgtggtttgccgtattcccggcgatgttctggggcatgtacaacgttgggctgcagaccattccggcgctgcacaagctatacggcgccgaacagctgcagcaggcgatcgccaacaactggcactacagcgtcgcccagtggttaggggtgagcttcagtgccgacgctggctggctgagcatgatgaccctgggcgcggtcttcttcctgccgatctatatcaccgtttttatcgtcggtggcttctgggaagtgctgttcgcgattgtgcgcaagcatgagattaacgaaggttttttcgttacctctattctcttcgcgttgattgtgccgcccacgctgccgctgtggcaggcggcgctggggatctccttcggcgtggtgatcgccaaagagattttcggcggcaccgggcgcaacttcctcaacccggcgctggcggggcgcgcgttcctgttcttcgcctatccggcgcagatttccggcgatctcgtatggaccgcggcggacggtttctccggcgccacgccgctctcccagtgggccagcggcggcggtgaagcgttggtgaacgtggcgactggcgtgccggtgagctggatggacgccttcctcggcaatattcccggctcaattggcgaagtgtcaacgctgatgatcttcatcggcggggcgatcatcctctttggccgcgtcgcgtcctggcgcatcgtcgccggggtaatgatcggcatgatcgccaccgccaccctgtttaacgttatcggctccgacaccaacccgatgttcgctatgccatggtactggcatctggtgctcggcggtttcgccttcgggatgatgtttatggcgacggaccctgtatccgcctcgtttaccgataaagggaaatggagttacggcgtgctgatcggcgtgatgtgcgtgctgatccgcgtggtgaacccggcttatccggaagggatgatgctggcgatcctcttcgccaacctcttcgcaccgctgttcgattatctggtggtgcaggccaatattaagcggaggaagtcgcgtggctgagaagaaaagtaacgatagcatcggcaaaacgctgctggtggtgctggtgctttgtctggtctgctccatcgtggtggcgggctcggccgtggggctgaaatcccgccagcaggcgcagcgggcgttggataagcagcgcaatatcctggcagtgtcagggctgatgcaccccggtatggatgcggatgcggtagcggacaccttcgcggcgcgcattaccccgcgactggtgaatctggccaccggcgaactgctggagaaagacccgggtaaatttaatcaggctcaggcgctgaaggatccgcagcagagtatggccctggatgccagtcaggatccggctggtataaagcgacgcagtaatctggcggaaatttacctggtgcgcgacgcagcagaagattgagcaggtggtgctgcccatttatggcaacggcctgtggtcgatgatgtatgcctttgtggcgctggacgtcgatggccgcacggtaaaaggcattacttactacgatcagggcgaaacgccggggctgggcggcgaggtggaaaaccctaactggcgccagcagtttgtcggcaagcaggtgctggatgacaacggcatgccggcgctgaaggtggtgaaaggcggcgcgcgcgcaggcgatctccacgcggttgacggtttatccggcgccacgctgacgtccaatggcgtacagcatagctttgatttctggatgggcgaactgggctttggtccgttcctgaaaaaggttcgtgagggagagctgaataatggctgaacagagcgatatgaaagaggtgaagcgcgtgctggtggggccgctcatcgccaataaccccatcgccctgcaggtgctgggcgtctgctccgcactggcggtaaccaccaaactggaaaccgccttcgtgatgaccattgcggtgaccctggtgacggcgttctccagcatgtttatctcgatgatccgccaccatattcccaatagcgtgcgcatcatcgtgcagatggcgatcatcgcctcgctggtgatcgtggtggatcagctgctgcgggctttcgcctatgagacctccaaacagctgtcggtattcgtcgggcttatcatcaccaactgcatcgtgatgggccgcgccgaagcctacgccatgaagtcgccgccgctggcgagctttatggatggtattggcaacggtctcggctatggcgcgatcctgattatcgtcggcttcctgcgcgagcttatcggtagcggcaagctgttcggtatcacggtgctggaaacggtgcagaacggcggctggtatcagccgaacggcctgttcctgctggcgccgagcgcgttcttcattatcggtttgctgatctgggccctgcgtagctggaagcctgagcagcaggaaaaggagtaatcggtgatggctcattacatcagcctgtttgtccgcgcggtgttcgttgagaacatggcgctggccttcttcctcgggatgtgcacctttcttgcggtgtcgaaaaaggtctccaccgcctccggcctcggcgtcgcggtgacggtagtgctggggcttgccgtgccaatcaataacctggtctataacctggtgctgcgcgacggcgcgctggttgagggggtggatctcagctttcttaacttcatcacctttatcggagtgatcgccgcgctggtgcagatcctcgagatgatcctcgataagtattttccggcactgtacaacgcgctgggcatcttcctgccgctgattgcggttaactgtgcgattttcggcggcgtgtcgttcatggtgcagcgcgattacaacttcccggagtccatcgtctacggcttcggctccggcattggctggatgctggcgatcgtggcgatggcggggatccgcgaaaaaatgaagtacgccaacgtgcctgccggtttgcgcgggttagggatcacctttatcaccaccggactaatggcgctgggctttatgtccttctccggcgtgcagctataagggcgaataagtatggaaattattcttggcgtcgtgatgttcacgctgattgtgctggtgctgtcggggcttatcctggcagcgcgctcaaagctggtgaacgcgggcgacgtggttattgagatcaataacgaagcggataaacagatccgcaccccggcgggtgacaaactgctgaacacgctgtccagcaacgggatcttcgtctcctccgcctgcggcggcggcggctcctgcggccagtgtcgggtaactgttaaagagggcggcggggatatcctgccgaccgagctttcgcatattaccaagcgggatgccaaagccggttgccgtctggcctgtcaggtggcggtgaagcagaacatgaagattgaactgccggaagagattttcggcgtcaaaaaatgggagtgtgaagttatctctaacgataacaaagccactttcattaaagagctcaagctgcggatcccggagggggaggtggtgccgtttcgcgccgggggctatattcagattgaatgcccgccgcataaagtggcctatgcagattttgatgttcccgatgaataccgttcagactgggataagttcaacctgtttcgctatgtctctgaggtgaaagagccgaccctgcgcgcctactcaatggctaactatccggaagagaagggcatcattatgctcaatgtgcgcatcgcgacgccgccgccgaaggtcccggatgcgccgccggggatcatgtcatcctatatctggtcgctgaagccgggcgataaggtgacgatttccgggccgtttggcgagttctttgctaaagaaaccgacgccgagatggtgtttatcggcggcggcgccgggatggcgccgatgcgttcgcatattttcgaccagctcaagcgtctgcacagcacgcgcaaaatcagcttctggtacggcgcccgttcgctgcgcgaaatgttctacgatgaggagtttgaacagctggcgcgcgacaatccaaactttaccttccacgtcgcgctctccgatccgctgccggaagataactggaccgggcataccggctttatccataacgttctgtacgagaactatctacgcgatcacccggcgccggaagactgcgagttctacatgtgtgggccgccggtaatgaacgccgcggtaattaagatgctcaaagatctgggcgtcgaggacgagaatattctcctcgacgactttggaggctgacgatgctgacggtatttatcgcgacctttgtgatttttgcgctggtgatcctcggcatgtcgctgggctacctggtgaagcgcaagagcatccagggcagctgcggtgggatctccgcgctggggctggagaaagtctgcgattgtccggaaccgtgcgacgcgcgtaaaaagcgcctcgcccgcgaggcgcagcgtcagcagcagcgtattttgtaatgcccggcggcgctgcgcatgccggacctgctgcttcagttttgtaggccgggtaaggcgccagccgccacccggcataaagcggctccgtgcccggcggcgctgcgcttgccgggtcagctgcttcggttttgtaggccgggtaaggcgccagccgccacccggcaacaacatgccagcaatgtgaggccgctttcgcggcttttttagccgttgactcccttactgccagcttttcgcctgcgccggagaatccaccatcaccccgtcggcgcccagttctatcgccgtgcggtagtcttccgcactgttgatgccgaagaagataatgtgcgctttatcctgcgagcggaagcaatccattgcctctttatcccaggtgagcgtcgccggggagatcccttcgccaagggtgaatttctccaccacctcgactttgcgcttcagctccaggccataccactgctcaccatcgcgttgactcgctggctggcactgatggctgagcgaaatattggcaagcctggtgcgggtttcactgcgagtgacaaagcgagggatggctggcggcagggcggcgatatagcggtcttcggtggaatagacccgcacgcgatcgaggctatcggtggtttttaacacttcaagcaggcgctggcccatcacggtcggatcggcatccggagatttgatatcgatatagaaaaaagtgtgcggccattgctgtaaaacgctttgcaaggtcggaatggtggcctgcttaccgcgccacgggtggctgtcatccccccatttccagccggcgtcgactttcgccagctcggcggcggtcaaactggaaactttgccctcgctattggtcaatgtggaaagatcgcttgaccggtagagcaccggtacgccgtcgcggcttaactgcaccgtgacccagatggcttcggcgttattctccagcgccagcttaatggccggcagggtattttccggcgcatcgccggtgccgccgcggtgggctatcagctgtggagcggcccaggcgccggcggtggccagcaggcaaagcgcggtaagtattttcttcatgattatatcttcctgatttatcttttaactcaatgaaaataaacataatttattacagttttatgttttaaccgcttttttagccgatgaaataaaaaaagcataaaattcgcatctgtttttgctatgctgtatgggtatacagtgttgagtctgacgatgcgtaaaattatccatgtcgatatggactgtttctttgcggcggtggagatgcgcgacaacccagcgttgcgcgatattcccctcgcgataggcggcagtcgggtacaacgtggcgtgattagtaccgcgaactatcctgcgcgtaagtttggcgtgcgcagcgccatgccgacggcgacggcgctcaagctgtgcccgcacctcacgctgcttcctggccgcttcgatgcctacaaagaagcctcgaaccatatccgcgaaattttctcccgctatacctcgcgcattgagccgctgtcgctggatgaagcctatcttgacgtcagcgacagcgagcattgtcacgggtcagccaccctgatagcccaggagatccgccagaccatcgaacgggagctgcgcctcaccgcctcggcgggggtggcgccggtgaagtttctcgctaaaatcgcttcagatatgaataaacccaacggccagttcgttatcgctccccatcaggtggcagagtttgtgcgggcgctgccgctggcgaaaatacccggcgtcgggaaggtatcggcagcgaagctggaaaatatgggcctgcgaacctgtggcgatgtgcaaaacagcgatctggccatgctgcttaagcgcttcggtaaattcgggcgtattctgtgggagcgcagccacgggattgatgagcgggaaattcataacgatcggcagcgtaaatcggtgggcgtggagcgcaccttagcggaagatatccatgaatggccggagtgcgaagcgattatcgaaaacctctatcccgagctggagaggcgactggcgaaggtcaaacctgatctgctgatcgcccgccagggcattaaactgaaattcaatgatttccagctgaccacccaggagcacgtctggccgcggctgaacaaagaggatctgatcgccaccgcgcacaaagcctgggatgagcgccgcggcggacggggcgtgcgcctggttgggctccacgtgacgttgctcgatccgcagctggaaaggcagcttttattagggatttagccatgcatattcgtgcttaccgcgacagcgatttgccactgctctgccagatctttctgcgcgcggtgcgggaaaccgccagtcgggactataccccggggcagatcgcggcctgggcgcaggtggatgagacgcgctggcgacaaaagctggccgactcaatcggcctggtggccgtggtcaacagccagccggttggctttatcaccgccatcgggacgcatatcgatttgctgttcgtctcgccggatcgtgcccgccagggtatcggcggcgcgcttatcgaggcgctctgcgttcagtatccagcgcaaatcctgacggtggacgccagcattaccgcaaagccctgttttacggctcatggttttaaggtggtggctgagcaacgggtggcggcgcgcggggagtggtttattaattaccggatggaaaaacgcgtggcgctaaggtgatgcggggtaaaaccggcggcgggccgccgccggttgtggggcttatttagccggaatggctttcagtagctcggtcagcagcgtccagtactgaccgacgctctcgatatggacctgctcatccggggagtgcggaccggtaatggttggcccgatggagaccatgtccatctccgggtacggttttttgaacagaccgcattccagaccggcgtgaatgatctggatgttcggcgtcttgttgaacagacgctggtaagtctcgcgcaccaggtgcatcaccggcgaattggcgtccggttgccagccagggtaagcgcctttggcttcggttttcgcccccgccagcttacccagagaatccagcatgctgaccacgtagtctttgccgctgtcgatcagcgagcggatcaggcagtggatctgtacgttgtcatcggtcatggtgacgacgccgacgttcagcgaagtttccactacgcctttcgccacgtcagagttgcggataaccccgttcggcgtggcgttcagcagacggatgaaagtgtcgcgggaagcctgagtcagcgccgctttgtcgttatcgaccgcttccaggagcaccaccaggttcttctctttggcctccagctcgtttttcagcagcgcctggtaagtattcaccagcgctttcagcgcatcggctttatccgcggcgacggcgacagtagcgtaagcttcacgcgggatggcgttgcgcaacgtgccgccgttgaaatcgaccagacgcagatccagctcatcggcgtggccggcgaggaagcgcgacagcagcttgttggcgttacccagaccaaggtgaatatcaccgccggagtggccgcctttcagcccttttaaggtgactttaaagctctggaacccggcgggaatcgcttcgcgggtcagcgccaggttagaggtgaaatcgatcccgccggcgcaacccatgtagatttcgccttcttcttcggagtcggtgttgatcaggatatcggcctgtagccagttagcctgcagaccgaacgcgccgtccatgccggcttcttcggtcatggtcagcagcacttccagcgggccgtgagcgacgctatcatcggccagtaccgccagtgcggacgccattccgataccgttgtccgcgcccagcgtggtgccgcgcgctttcacccattcgccgtcaatgtacggctggatcggatctttaacgaagtcgtggacggtgtcgttatttttctgcggcaccatatcgaggtgcgcctgcagcgctaccggcttacggttttccataccggcagtcgcgcctttacgaatcagaatgttgccaacctggtcgcgttccgcatgtaagcctttttcttttgcccaacccataatgtgctcggcgagctgttcttcgtgatatgacgggtgcgggatggagcaaatcttggcaaaaatatcccaaagcggctgcggggatagttgagacagttcagacacggtaagtctccttacagactcctgcatacagcggttgcaggacgagggttagcgttaaaatacacaacaagcccgggcttgcgcgatggggttgagaataccactttccaccgcctcaggtagtgtaaacaacgcaaaaagcgttgcgcaaaccgcttaacactggtttttagtgcgtcagatctctataatctcgcgcaaccattttccccctcgaacattatttaagccgtattacacaggctgggacacttcacatgagcgaaaaatacgtcgtcacctgggacatgttgcagattcacgcccgcaaactggccagccgtctgctgccggttgagcaatggaaaggcattattgccgttagccgcggcggactggtaccgggagccttactggcgcgtgaactgggcattcgtcatgttgataccgtatgcatctccagctacgaccatgataaccagcgcgagctgaaagtgctgaaacgtgcggaaggcgatggcgaaggctttatcgtcatcgacgatctggtggataccggcggtaccgccgtggcgatccgcgaaatgtatcccaaagcgcactttgtcaccattttcgccaagccggcaggccgcccgctggtggacgattacgttgtggatattccgcaggatacctggattgaacagccgtgggatatgggcgtggtgtttgtaccgcctatcgcaggtcgttaattcttcaggacagtgctatttaccacgcccggcttgccgggcgtggttttttttatcctttagcaggttacaatatccggagtggcactacgacggagactgcacatgtcacaggctaacctcagcgaaacgctgtttaaacctcgcttcaaacatcccgaaacttctacgctggtgcgtcggttttctgccggaaaaccccaggcgatgcagtcggcgctgagcggcaatcacgtcgatcactggtaccgtctgatcaaccgtttgatgtggatctggcgcggcgtaactccgcaggagatcctcgatgtgcaagcgcgcattgtgatgagcgaggccgaacgaaccgatcctgagctgttcgataccgtcatcggctatcgcggcggcaactggatcttcgagtgggcgaaagaagccatgcagtggcagcaaaaggccgggcaggaagccgatcctttgctgagcggccgccactggctgcatgcctcgaacctgtatagcattgccgcttatccgcatattaaaggcgatgagctggcggaacaggcgcaggctttagccaaccgggcgtatgaagaagccgcccagcggctgccgggctcgctgcgcgagctggagttcaccatccctggcggctcgccgataaccgggtttttgcatatgccgaaaggcgaggggccgtttccgacggtgctgatgtgcggggggctggactcgctgcagaccgattattacaacctgtatgagaactacttctcaccgctcggcattgccatgctgaccattgatatgccctccatcggcttctcgtcaaaatggacgctaaatcaggacaccagcctgctgcatcagcacgcgctgcgccatctggaaaatgtgccgtggattgaccatacccgggtcgccgctttcggcttccgctttggcgccaatatcgcggtgcgtctgggctatctggagccgcagcggctgaaggctgtagcctgtctgggcccggtcgttcatggtctgctggtggatcccctgcatcaggggcgcgtgccggagatgtatcttgacgtgctggcttcgcggctgggcatgcatgacgcgtccgatgaagcgctacgcgtggagctcaaccgctattcgttaaaaacccagggactgctggggcgccgttgcccgacgccgatgctctccggcttctggaaggacgatccgttcagccccgaagaggagtcgcggttaatcacctcgtcatctgccgatggcaaactgctggagatcccgtttaacccggtgtatcgcaattttgatcacgcattgcgacagatcgcccgctggatcaatcatagatttggttaatttattgctaaattctattggtttggtaaaacagttgcatcactaaaggagatcgcaatgacgttaccgagtggacacctgaaaagtaagttgatcaagaaattcacggcgctggggccttacattcgcgaagagcagtgccatgacaaccgtttctttttcgattgcctggcagtttgcgtcaatgttaagcccgcaccggagaagcgtgaattctggggctggtggatggaaatggaagcacaagagtcacgtttcacctatagctaccagtttggcctgttcaataaggaaggatcatggcaggcggtcgacattgacgacccggaagtgagcgacaggctggaaaaaacgctgcgcgagtttcacgagcgcgcagcagcgctgctgaccacctttaatctgaagctggaaccggccgacgatttcagcgagccggttcgcctgcgagcctgattgatctacggatacgatttctccacgcccgtgcggcgtggagatgcgtgccgccgtacccgtaatttccacccctccatctgactcaccctgcctgcggcgacagcttgccagccatcgcctgttgaataatcgggatcggagtcagtaagtgctcgcgcatcagcgcgctggcctgttcggcgtcgcgcgccagaatagcgtccaccagggtctgatgctggacatgcttatcttccagcatctccaccgacagcacggtggtgcgcagccagatgaagcggtagcgcgccgccagatcgaacagccgttcgcgcatctgcagcagatactgcgaaccgcagccggcgacgatggcggtgtgaaacgcctgatggcgctggtcccattcatcgagtaggtgctcactcgcttcgcacgactccagcttgttgagcagatgggcgcgggccagcagctcggcttcccactcgtcgccgccgcgttcaatggcgagacgcaccagcatggcctccatgttggcgcgcgcgtcgaagatatcgagaagctcctgttccgacatgggcgccacccgatagcctttctgattgaccaccgtcaccagccgctcggccaccagttgcgaaagcgcctcgcgcagcggaccgacccccaggccatagcgcgacgtcagcaggctcatccgcagcttctcatcggggtggtaaaccccgcggatgatgtcgttttttaaccaacggtatccgtcaatggccgtcgcctggggaatggcggtcatgttcttactcctgaatactcttcccggcgggcgccgggaacagggttaacgcgtattttgcagcggcagtttttgccacaataccagctttttccagcgtgacataatcggtaccgtacaaataattcccagagctaacaggccggtagagatcacctccagctgctgcgccggacgaaacagcatcaccaccagcacgaaggtgataaaggcgatcaccagccaggtcaggtacggatagagccacattctgagacggatctcgccgccttgcgcctgaaggattttgcgcatccgcagttgtgaaacggcgatcaccagatagaccagcagggcgatggcgccagagctgtcgatgagaaatttaaacaccttggcgggggcatagtagttcaccactacggtgaggaacgccgcgccggtggagagcagcaccgccacgtatggcgttttgctgcggttggtccggcccataatggccggcgcatcgccgcgacggctcagggagtagagcatccgcgaggcggtatacagcgccgagttcagacagctggtgaccgacaggaggatcacgccgtccataatcagcttggcatagggaatatgcagcagctcgagcaccgagcggtaggagccgatgctcttcagccccggcatattccatgggatgagggcgacgacgataaagatcgagcacagataaaaaatagagatacgccagatcaccgagttggtggcgcgcacgatatgtttatccggggtatccgattcggcggcggcaatggtgacgatctccgcgcccataaacgagaacatggtgatcagcatcgcgctcagcaccgcgccgaagccgttaggcataaagccgccgtgatcccacagccgcgaaatgccgctcacttcggcatagggataaaagccggtaatggcgaccgcgcccagtacgataaacgccagaatagcgatcactttgcacagcgccagccagaactcgaattcgccgtagttcttgacgctcagcaggttactgccggtgagggcgagagtgatgaccagggagaacaaccacaccgggacgcccggcacccacgaatgcagaataatcgccgcgatattggcttccagcggaataaccaggacccagaaccaccagtacagccagccgatggtataccccgcccagcggccgatggctttatcggcgtaggtggaaaaggagccggtatccggcgtggcgaccgccatttcggccagcatacgcataatcatcaccaccagcagcccggcaaacagataggccagcagcaccgccgggcctgcctcggcaatggcgacgctggagccgacaaataaactcgcgccgatcaccccggcgatagataacatcgtgacgtggcgcgacttcagccccgcccctaaatcctgtgattgcgacagttgccccatcatttaccctctcgaagtgtgtcacctgggagagcgccccgacgttcccgcgccggggcacgcgtattattgttgttttgcaggtctcgtcttcattcccttacgaacgtacttcgcttccgcatgtgttctgttctatgcctgtttctctatgcctgtttcgcctcgctaaagcagtcggcaatgatcttgagcccctgctcgatctgcgcctcttcgatggtcagcggcaccaggatgcgcagcacgttgtagtacggcccgcaggagagcaggatcaggcctttgtcgcgggcgcgggcgacgatatccgccgtcagcctggcgttcggcctgctgtggtcgccctcttcaaacagctcaatggcgatcatcgcccccagaccgcgcacgtcgccgatctccggatgatcttcagcgatcgccagcaggccctggcgcagggtgtcgccgagctggttggctttttccagcagattctcctgctcgaaaatctgtaataccgccagggcggcggcgcaggcgatggggttgccggcgtaggtgccgcccagtccgccgggggcgatggcgtccatcacctccgcgcggccggtgacgcccgccagcggaaaaccgccggcgatggatttggcgaaggtggtgatatccgccgcgacgcccatctgctccatggcgaacagggtaccggtgcggcccgcgccgctctggacctcatcggcgataagcataatgccgtgctcgtcgcacagggcgcgcaggcgctgcataaaggccggggaggcggcatagaacccgccttcaccctgcactggctcaataatgatggcggcgatatcttccggcgcggcatcgtttttgaagatgcgatggatgctggcgatcgcctcgtcatcactgacgccgtgcagcgcgcacgggtagagggcgcgatagacatggcccggcattaagcccataccggcggagtaaggattcactttgccggtcagcgacagggtgtaatgggtgcggccgtgataggcgccggtgaaggcgatagcgccgctgcgcccggttgccgcgcgggcgatcttcaccgcgttctccaccgcttccgacccggtggtgaccagcagggttttcttggcgaaatcaccgggcaccttttgattcatcttttcgcacagcgccagataaggctcataggccagcacctggaagcaggtatgcgacagctttttcagctggtcttcgacggcggcgacaacctgcggatgcaggtggccggtattgagcaccgcgataccgccggcaaaatcgagatattcccggccttccacgtcccacacccggcagttctccgcgcgttcggcgaagatagggtggatctggccgacgccgcgcggtaccgcgtcgctgcgacgcgccatcattgctttattgctgttcatccgtcgctcctgttaaaggccaatgcacatatatttaatttctaagtaatcttcgatgccgtacttcgacccttcgcggccgaggccggaggccttaacgccgccgaacggcgcgacttcggtggagataatgccggtattgatgccgatgatgccgtactccagcgcttcgccgacgcggaagacgcggctcagatcgcgggcgtagaaataggcggcgagaccgaactcggtatcgttggcctgggcaatgacgtcggcttcatctttaaagcggaacagcggggccagcgggccgaaggtctcctctttcgccactttggcgctgtcgggaacgttgaccaggatggtcggctggaagaagttgccacccagggcgtgcggtttgccgccggtgaccaccttcgcgcctttggcgatggcatcggcaatgtgttcttcaactttggccacggctttctcgtcgatcagcgggccggtggtgacgccgtcctgcaggccgtcgccaatgcgcagtttttccaccgcctgctgcagcttctcggcgaaacggtcatacaccccgtcctggacgtacaggcggttggcgcagacgcaggtctgcccggcgttgcggaacttcgacgccagcgccccctcgacggctttatcgaggtcggcatcgtcaaagacgataaacggcgcgttgccgcccagctccagggagacttttttgatgtctttcgcgcactgctccatcagctggcggccaatctcggtagagccggtaaaggagagcttgcgcaccagcgggttgctggtcagttcgccgccgaccgcgccggcggagccggtgaccacgttgaatactccggcggggatcccggcgcgattcgccagttcggccagcgccagcgcggaaaacggcgtctggctggccggtttcaggaccatggtgcagccggcggccagcgccgggcccgctttgcgggtgatcatcgccgccgggaagttccacggcgtgatggcggcggtaacgccgatgggctgcttaatcaccagcaggcgcttgtcggcctggtggcccggaatggtgtcgccgtagatgcgcttaccttcttcggcgaaccactcaataaaggaggcggcgtagctgatttcgcctttggcttccgccagcggttttccctgctcgagggtcatcaggcgagcgagatcgtcctggttctccatcataagatcgaaccagcggcgcagaatgttcgcccgctctttggcggtcagggcgcgccaggcgggtagggcgcgattggcggcttcaatcgcttcgcgggtttcatcggcgcccattttcggcacgctgccgagctgctcgccgttggccgggttggtgaccgcaatcacgtcgccgttgggcgcatcgcgccactggccatcgatcagcgcctgctggcgaaacagtgtcatatcgttgagttgcataattgcttcctgtcttcagggggggttaacgggtaaaagcggcgtgtagtgtctccacgctacgtgccgcacgcagcgtgcgtccgggattgctctggctggccagcaggctctgcaccttgctgacgatatgcgcgccgatcgggatagcggaggtggccgctggcgatggcgcattgcaggtatgtatcgaacgcgcggtggtaacgaagagaaaatcgtcgatcagcttgccctgcggggacacggcctgcgcccgcacgccggccggccacgggcgtaaatcgctcagcgtcaggctcgggcagtatttttgcaccagccgcagatagccgcttctgcacagcgaattcttcatttcgcccagtccggagcgcaggttgttttgcagtacccggcggatgccgggcgaggtgaggatctccagggtatcggccagcgagatatcgcgcttacggtagccttcgcgcttcagagccagcacggcgttggggccgacggtgacgctgccgtcgatcatgcgggtcagatggacgccgaggaacggcatcgccggatcggggatcggatagatcaaatggttgacgatctgattgtgctgcggcgccagctggaaatactccccgcggaacggacaaatgataaacccggggtcgacgccgagcatttttaccagccgatcggccatcaagcccgaacaggcgatcagcgtcgaggcctcatattctccgccctggcgggtgcggatcaccacgccgctggcatgttctttcagggcgctgacttcggcgttgtagacaatcgttccgcctttcgcttcgaagttcttcgccattgccgccgccacttcgcggtagctgacgatgccgctggaagggacaaagatcccgccgagcccggtaatgttcggttcgcgctcgcgtagctccccggcgcttagccactcgcgctgcaggccgttggcggcggtgcgatcccacagggcgcgcatccgctccatctccagcggtgaggtggcgaccagcattttgccgcagacgtcatagcggatgccgttctgctcgcaaaaggccttggtggcgcggttgccggcgaggcaaaactgcgccttgaggctgccgggcgtgtaatacaccccggcgtggatcacgccgctgttgtggccagtctgatggcaggccgggccggcctctttttccagcagcgcaatgcgggcgtccggataaatctcaattaactgcatggcggtcgacatgccgatgatgccgccgccgataatcacgaaatcatacatccgctcaattccttcgcctgaaaacccttattgatgagtctggtaatgattcgtggaatacgcaaagtagccgcgctggcgcatcagctcgcggcgcaggtccgggtgcggcgtaaagcggtcgcggccgtgcagccagaacaggttgttaatgagcagaaatttgcccaccggcaccggtatggaaaggatgtttttgctggtctccagcgcgtcggagaggcggctcagccaggtgccttcttcgaaatctttcggctggacgaactggtcgatatagcgcattaccgggcggcccagcgaatcgacgtcgaacaccgggtggaaaacatccttgctgacgtttttgctcggcggcgcggcccagcgcattgggcggcgagccagcgggtcgcggaaaaattcgtcgagatgctcccagtcgtcgagatgcagcagcagggaattgccgccctgcatgttctgctcgtcgatcttcatcattaatacgtagtcggtttgctcttcgacgtaggtgccgtcgttgtgcagctccatcacccggtgcggttggcgcaggtagctgtctgagttatcgacatttttcaccacgaagcgggcgtaatactgaccgctcatggcgtcgaagttggaacgaccaatcaggtgggcgacggcggtggccagcttgaccatctcctcggcctggctgacgtgatcgatcccttcgccgttgataagcagcgcgccttccgcgcgatcgagcaatgttttgatcagcaacggctgcagctgattgccacacagatcgtctaggatcttgccgacctggaagcgtaagaaagatttgtactccagcgcctgcaccggccactgcgcgacctgctgcaggaattgcgtggtcgtttcggcggaaaaggtgagctccagcaggcgcggcgactgggcggaaggggtgaaagaaaatccagggtattgctgggctaccggcgcgggtgtcggttttactgcggtcagggcgttcatcaggatcgttcctcgctgtaaggtcagggtgatgttcatttcgtagccataaattaaaaatatctacatttttataaaatgcgtacgaaatggcctttttgtttccattttgtgatctgacaacaattatttaacaatacgggaggggggataaggtggtggtgaaagttgcggaacagagcgggtggcggatagcgcaaaatggggataaggccgagggaaatcgtaataccggtcacagtttttaatctgcacaatatccttaccagatgaaggtgttaatattcagccggtaaatacctttcaatgctcactgaggcttcgatgctggagaatgtcattatcagataatcagtttcccgacctgcccaggccggactgattatcgctgcgcttaaaccttacgcacacacctgcgggtgtaggcatgttttcgcacatgataatgaacaggtttcagtatgaatttatcccgtcaggaacaacggaccttacacgttctcgccaaaggtggccgtattgcgcacgtccgcgatacctccggccgcattaccgccgttgaatgttacacccgcgaagggctgttgctgagcgactgcacccttgcggtcttcaaaaagctcaaaaccaaaaagctgattaagtcggtgaacggccagccgtaccggatcaacacgaccggtttgaataacgttcgcgcacaggcggacaaccgctgaaatagcgacccgggcagggtcgctgcccgggcgtatggctctcaaggagaaaacctcatgatcgatatccctcgcatttttaccatcagtgaaagcgagcaccgtatccataacccttttaccccggaaaagtacgccacgctgggacgggcgctgcgaatggcgccgggcaccaccattctcgacctcggcagcggctccggcgagatgctctgtagctgggcgcacgatcatcagatcgtcggcaccggcgtagacatgagcctgctgttcagtcagcaggcggccgcccgggcagaggagctcggggtaagcgaccgggtaacctttgtgcaccaggatgccagcggatatgtcgccagccagccgtgcgatgttgccgcctgcgtgggggccacgtggatcggcggcggggtggcaggcacaatcgagctgctgaagcagagccttaccccaggcggcatgttgcttatcggcgagccatggtggcgcaaacgtccggccacggcagaagaggcgattgcctgcggcgcgcagtcacccgatgacttcctgacgctaccggcgctggtcgcccactttggcgaactgggctatgacgtggtggagatggtgctggccgaccaggagggctgggatcgttatgaagcggcgaaatggctgacaatgcgccgctggctagaggccaatccgcacgatgacttcgcaccggaggttcgccagcagttgaccactgcgccgctacaccacgtcacctggacccgggaatatctcggctggggcgtgtttgtcctgatggcgcgttaaccggtatgtcggtagcgtcaggaggcgctaccgaccaccttcagaccttcagttcgtcgtagctgaccatgacgtgttctggggtatcacaacgtacggccaggagagtaggggcacaatagcgatgagtcgcctggggggggatgagctgtgggggctggctagccttgcgataacgcaatttcatccctacaaaggtataatgaccatcaatatggcgcttgtataaaataatgcagcaattatctttgaatgagaataaggcgagggagtggaaacgttagttattctggccgtagtcgtatgggtacttttcaaactggtacaaaaggttacgagcaaactctatcctccagactcggtgaaggtacaggagaagcccgacacaacgccagcgacggatgcctggggaaattaccctaaagctgaagggcatgtcgttttattcgagcagtaccggcgtgagcaggcgctgcggcagcaagcagctaaagaggctgatacgttctaccgctcaagggagtggcggcgtttacgttaccaggcgttccagcgctacggcaataaatgttgcgtatgcgggcgcggcgccaatgacggaatggtgatgcacgttgatcatattaaaccgcgttctctttacccgcatttagccctcgatattgccaatctgcaaatcatgtgcaacgagtgcaacgtcagtaagggcaacagagatgaggttgagtggcaataattaataaggataagatgcaaatatcgcagcaaaacgaaccatttactttcagacattttcctgcgtaaaaatatatgctttgagcggagcgtgaattgcacagaccgcgccagataaccgccataactgccatctgcaatagagtggcagaagagtgaggcttctgatccactttcggtaataaaaaatggcgctcaaatttctttgtccataatggttgcggtataggtccgccagttccccgaatcgttaatcaccgcatagtctactgttgaccccgccgctggcatattagaaagcgcgacatcgcgctgctcatagggcgcgagcatgatgttaccgatacttattccctttatcggcgcgacagccaggctcatataccacggggtcggattggttatcgtgatgccctgcgaagcgatactgaagcgtaatttccgctcatcgttgctggtgggggcctttaagccgtgcggacgaataaatacctttaaccgtaatcgcaggggtaacactaatttgcgagtgacgctgtctgatgcattctgctcgggggggatctggtaaatattaagccagaaaaggctttcccgatcccctggcaaactacggcgcgagctcagcatcacacgaagcgttctcaactcatccggctgcattttaaagacagggggcaagaccaccagcggcgtgcggctactgtctggtgaagaggccgtctctccggcatcggtccagacctgtaacagcatcggcgtcacgctattgtttgtgagcgtcagcgactggacaatatcgttagcagcgaagacgagccgggttcgatcaacgttaaccgcagcaaacggcgccggagtgatgcctgccagcaacaatagcgctaacaaagccttactgaaaactaaccactgcctgtaactgcgcattcacgctccctaccgttaccgtttgtcctccaagcgcctcaagggaggccgtaaaatcaccgtgccagatttccaccgaaccacgatcttttttgccggtttgtaccgtgagctccttatacccataccagccacgggcattgcccgttcccgtactcgttttgtctggtaacaggttaagcggcgcaccgcgctcatcgtaaatccgtattcctactccggaagccacgcccttttcgccataatgcgtatccagtaaccaggttaatccgccaccggtggtcgtcaggcccaggcggcgcgcggcggcaacagccgcaggctggttgaccaaaaagcccatggcgacattagctacctgggttgtggggtgagttgaagacatcgcgccggcttcgcactcaagcgttatactgaaaggcgcctcgctgctttcgccagaagtaagcgcttctgctgatatggtggggagcagcactgtcgcaggataatcttcaatggtgcaagctgcgccgcgaatataggtaacctgattatagctactccatgcaccgggccaataagcaggccaaccataatagcttgaagcatgatccatacctggctgaatagcggatgttattaagcccggccctttaaaggcgatataaccgcgcggctgggtatagaggtctttgttgattctgtccgaataaatatactgatccgaggcggcgattttaatcatctcatacaggacattactaaacgcgcctgcgggaatatagattgcgcgatcgtcctgaaaccaactatccgcagtaagctggcgctgcttccagtagcggctatagtattcgccagtactcaggttagtcatccgtaccgcgacgttacgttccgcgtcatagtaggccccttcaacttctttcgcccggcgtcctccaacaaaagggttatcggcattggtagaatataattcgtacagttgcccggcatccttcaaatcacagcggtaaagcacctgttttgccgagtagggtgtctgaacgccggcggtaaggaaattagccactgcgctggcaagcacagtacctgaaggctggaacttgttattggcgctaacgctaatgactgacggcagaccaagatgaccgatattgtcatcataggcgccgcgccagtagcgcgcggtataacccgctttaatcgcagcctcagaaaggaaactattatccgtgaccttaacgcagttagcccagggcgcggtgctgaaaagcaagccagctgcaaacagcagcgttcggcgaagatgacacatgagactatttcctctcgcaggtagtcgtgagataaatcacgttttcaggagaatgcatatcgaactggtaaggcacacggcaacgtcggttggctccttttccccaacgcaccagtaatgagccagagggtgtgctgatccgggcatacacctgcccgccttgcccgaccatcccaatgacggccccttcgctgttcatgacctcggcgcccattggcggtatgccgccatctgccattttcaccgcgatgagcaccgctttgccggtaatcgttgagaagttcacccgtgcgatcgcgccagcatagggaaccacctgttgacttcccccggtcagctcagcatcgctgcgcatctgccgggtatcgagtgagacgttgttgcgacgatagggagatagcgagggcaaaatggcatacccaaaacggtcgattaccgccccctgaccgttctgtacgacggcgccctgtgcgccatcggcgtgaattaatgcaaacgtgtcgctggcgtaggggccgaacgtcacgccaccggaatgcaacaccacggttccggaggagcctagcgccacctgacgatagtcttttccctgatcgtagcccacgcgcagcgcgccaaaacgggtgttttgctggacgttgccgccaaaagtcgttgctgtcccttcatccccattgcgatagcgatcatagccgccgtagaccgaccaggagagttcggtctgctcgccacgggttccgttcatcgacaaggttgaggatcggttcgcgcgcgactggttataattcattgccacggaggtcggattgtcgccccagttaaagggaatggataaagtgaacgatagcgtcgtctcggtatatttttgccgctggttcagatcctgcggttcgttaacgctgtggtagaagcggccatcgtcccaggtggagcgctgcctggcaaggttgaatccataactcacttttcgccactggttgctatagcccagctgcagttgcgtgatccgcgaccggttattgtaataatcagcggtactggcgctaagattgagcgtccccaaccgacctaacggctggctgacggttgcagaaagacgttggcgttggtgtagggtatcggagtagtaaacaatgctgttgtgctcctgttgccggacgccaaacacatcttctaaatcgcggaatccgccggttgagtagcgataagccgccagtaccagattagtgcctgtggaaaaggtcttgctatagctgaactccgcgcgccagccctgctgccgatcgttatgttccacttgtgcgccagaccaggtggcattcatcccgaacgcgcccagacgggttgccagaacgccgccagccagccaggcctgataatcatgcgccaaccgcgatccaagattaagcgtgagatgattattcaccccgtgctgcagcgtcccctcaagaaaacggttgtcgatgcggtaatattggcggaccttgcctagagcaaaagcgtagtgccagttaccagggcgcaccgagtcgggaacggcggaatagggaacggtaaaacgagatacctttccgttagcctcaatcaccttaacctgcaaatccccctgatagcgggtgttgtaaagatcatctatatagaacgggccaggtggaacatgggtttcatagataactttgcctagctgtttgatgaccacccgcgcgctgcttgacgccacgccatgcacctccggcgcatagccgcgtttgccctgcggccacatgcgctcatccgtggcgagtttaataccattgaatgacaggctgccgaataaactggagtcggtatagttatcgccaaatgccatgatgctgtcgattgcggtgagtggccgctgtacccaggtgcgcacgcgattataatgccaggcgctaccgctttggttactgtcggcatagcgcagattcccctgatggcggagctgccacaggccaatattgctgccaacgttgatgccgctccacaaatagtggtagcggaagtgctggctggtgttgtctgtgtgggtccagttggtgttatggcgtaaaaacagcgccagcgcgccgctgtcccactgcgaaggcgggatatagccgcgcggcctgtgcataagctcgctcatcggtagcgtaagccggaactgtagcgtcgcgctatcaaattgccattcaccgcgggatacccaatcccttagcggacggcagctattttgcagcgcgttgtccgggagagatttaacctgagcggcctgcatcagcgataacggaaggcagggctcggtgcgctgtccgccattgactggactaaagcggatttttacgccggattttatcagcgttccattgacgataacgtcaaccagatactctccggcgggggtgtcgggtccgttaacgctcgccataccttgtccgtaagctgttccctgcaatagagaggggtcgaaataatattcttcaccgaaagcctgaccaacgcaggctacggctaagataacgaagatattttggcgtgagaatttaaccttcagcgacatgataacgctcgcttatccttgcaccctggtcgttaaccaccgtcacagtgacggtaccgttaagtgaattggcgctgacgtttcccggtatccagaaagtgcgactggaaaaaggggggaccatgtcgacattaagctcgtgtgaagtaccatttactttcacgctcagattactgagggaggcataccagggttgcggattgctgatgacaataccggcgccttttcgggcattacgcaccacggtgatgtgcagttttttcgccagattacctggtgaaccaatgccttccggccgatagaagagtttgatccgcgtcctaagcatcaccagcactttattttgctggcggccacctatattggctggcggtacctgcaacgcgttgaaccagaaaaccgattcacgatcgtgcggcagcgctttacgctggctatagacaacgcggacaatctgccctgatttcggttggattcgaaatactggcggcgtagagataaaaggaatgccgctcgcgttctccggcccaatatgcagatcgccattgtcaaaccaggtttgtacgatatagggaaagtcatcgttattttttagctgtacatcgactgaggcgacggtcgatggataaataatccgactgcctacaatggtaacgctggcccaggccccggtaacgggaaagaacagggctatcagcagcaccagatagcgtagccctgaacggggggcatcctttttcatcgcaacaactccattgctattaaaaaggtccgacggctagcaccggaccacggagagttttacaggtaggaaacggcgtactggagagtggcttcgaccgtaccagccgatgctgctcctgtggcgtaatactgcgcagtgtaggtggcgctggcttccgtctctccaggcttcagttgtagatcgccttcacctttgaagccgttggtcaaattgataactttatttgcggtatcaaggagttgtacttcaacgttggtcgcgtctcccgtattcccaagattaccgttgctggtcacctggttaccaacgaagacggtagagattttggtcgctctatcggtattacccgtgcagccggtgagaccaatatcaaatgtcacctgacctgcgacatctccgcctttcgccaattccttggcactcaccgtcggcagaataactaccggttttgcctgattgccgttaatcgccacagaacaggtttcatcggaaacttcaccgcgaaaggtaatagtattattagatatggctagcgcgctggtggaaataaaaagtgaggctgttaataaagccagtgtggttttcttgaacatggttttttattcctttgttgctattcatttatatatgatgaggctcgctctgcagctagggcagataaagacaacgtcctttagttgatgcaaaacaaaatagcgtctcgccaggtgattttattgtgcggttcccggtgataaggttgcatagcgacgtggtcaatcgccgggcggcgccatcatgttttaaaggcaagattacgaaccattttctgaaaagagcttactgatgtgctgaatattccttaaatttatcttacttgactggtgtgttgatattcaaaaaaggtaagaaaaattcataaaggaagctaatctattgatttggtgaagagtaagcaataagggtagcagagctgatgttagtgactgtgttttgtgaaaagattgcgaatgttaaggtgggtgaaatcatttcaccctgtgttaatatgacaggcgacagagtaagtgtattgaagaacggattttccatggatgaagagttgttgttaatcgctaaaaaggtgatatttgatagtgccagaatgacattggctaatggtaataagattattaaaatctctgagtcggagacaaacctacttcttgccttccatcgcggtatatataaaaaagaagatatcattgatttcgtctggaagaatcgtgcgggttgtgtttcagaatcgagttattacaagcttattaatcaaatgcggaataatttttcgctcgttggtttgaaagcggacgatattgttacccgtccacgaattggtgtttcgttgtcactgccattagaaccgttcaaaaaacaacgttcggaagcaggcgaacagaccagcgatacagcgcggggtaaagacagtcgtcagactcatctcgcggagggtaaaaaatttaccgccaaaatacgtcttctggtgctgacaatgttgttgatgctgttaacggctatagcgatgctatttcaacatgcacctgtgcaaaataaacacaaaagcaccttcaggatgcttggtgataaggatggctatatcttcttcaaaatggcgagcgataaagtgacatttaaggaggtggtttcggcctataacaccctgacgctaccgctatgtcgccagaacggacattatctttattacctccgggagccgaacatgaatctttttttgcagtgcctgaatcctgttgaaacggcggtaccaaaatgcattaccatcaaagagcgttactaattatcctgtgtggtctgctctgcgcatgtatggtgctggcaacgcaggtgtatcggggagccagacgcgatacggaagaagtgaataaccttatttgcactgctaaatcaaatgtttatataaagtcgcgaaaattaattttgagcggaacattggtgctggacttgaaatccaatcggattgctattcattacgccgtgcaggatcaacagcgggagcagcggttattctttcaggacatcaccatcagtgcgcctaaccggattggcccgaaaacctacactttccggattgaagccgtacacaaatttgattcggatacgacgggggagatgttttcctggctgcgtctcctgcaaccggcaaccgtgaatgagctgacgataaacaaagtcggtcagcgaacctatcttttttcactaaaccggcagatctataatttttgcacaaccagcggtagcaccaaggcataatggggcttgcggtcagctataccaccgcacatccattcgtgaatgagaggcgaaaccagtgaagctaaaactatcgtatataatttgtgcagtgctggtgccgctggtcatgatgattacgttagcactgctggtcagtgtcctgcagtttaaacaggatgtcgccctgagtgcgaaaaccttattacgttttagtgaagatgtctcaactgcttcgtggcgggtcaccgggcaagccgtaaaattagcggacaggccctgcgctgaaattttgtcggagcttaaccgtacccgcgcctttactccttatattcgtgatattggtttgctggaaaagggcaatctgctctgttcctttgttagcagagagcaggcgcatccttttcctctgccaccaggtaaaacgctcccaacgccgctacctgccaggtgggttcgctcatttagctggatggccggtgggcctggcaggcccgcggtggtttacacacagcaagtcgcggcggataaagcggcgtttgttatcgtcgattctcggtatgtccaggagctgatggatgtactctcagaagagagagaggccgttttcagcctgagatttggcaaaggcgatgccattatcagtcaaccagcacagtatgatcgaatagtgatgacccagaattacgtcactgacgacggaaagatttctcttaccgtcgctgcgcctcttggcacattgacggcagtttggatgaaatctctgctcatttttatccctctctcgttttgcttctcatttttgaccctggtactttaccggcattggtcgaaaatgcggatgtccatggcgcgagaaattatccgcggtatgaaaaatgcgcagttcacggtgcattatcaaccagtatttaacgtcaaccgcggtaattgtggtggggtagaggcattaatgcgttggcctcttcccgatggtcgttttattacacccgacattttcatcaccgccgcagaaaacgaaggtatgatcgttccgctttcgcggcatctgtttaagctcatcgccgaggatgtcgaaaggtggcaggtcgccgaaggcttttatatcagtgttaatatttcgcctgaacacttggtgcatgagagctttattgaagacgttgagttgttacaggcaagattaggcaatctgcgtctgatgctggagctcaccgaacgcagcctcattgtacaaccagcacttgtgtcagataagctgatacggctacgtgagaaaggcatattgatagcgatagacgattttggtaccggctactgttcgctttcttacctccagcagctacccgttgattatctgaaaatcgatcgtacttttgtcgatacgattgataccagcggtagcgacgtgcccattctggataccattatcatgcttagccgtaaactcggtcttaatatcgttgcggaaggcgtgagttcagaacatcaattgagctatattctcgatcataacgtaggatttatacagggctatctttacgcaaagcctatgtgttcatctgattttacgcgctggcttgatacgcgtgccaatgagcaaaatgacaggattaaatgcaaaaaatgttcaataaatcagtaaccactgaggtaacataatggtttaacctgaacgacgcattcttaacagaaggtcttatgagtaagaaaaaatacctaattgataagaaagtcattcttgattgcgaaaagatgacactgtcgtgcgatcgcgaaagcttgagaatttctgaatccgaatgcaatttgcttattgctttccatgaagggttatttaagaaggatgacttaattgcctgggtatggggacgaaaaggcgttgtggtttccagtgcgagctattataaattaatcaaccagttacgcggttcatttgaaaaggtcggccttctcccttcagcggtattaacgcgtcctaaggtcggcgtaacgctctcggtatccatcgaatcattgcctgatgcttcaacacccgcaatgcaaaatatcgccagcgataccgttgcgccagttgcagacgcgtcgccagaaccaacgcaaatttctcagtttaccatcaggaaagaatggttttttttaatcggcgcaatgttattcttgctggtaatgatttatatataccacaacagtaagccagattatttttctgaattgggaacctataacggatataccttttacggtgttacagaggataaccgtactcttgaggatgcggtgggggctttttccgagttgagcccgcaagtctataagcaaaatggcaattttatttattatattcgtgtccctaataccaatatttttgttcagtgtctgaatcaactgaatgtttcggagcccaaatgcatcactatcaaagaacggtactgaacagcattacgctgcttatcctggcggtatccttcgcgttactgattttacatgtacgtcaacaacgctaccctttatcagatttgaacgcttttttatgtactaccaggacggtaacctcagttcaaccgggtaattttcacgctgatggcaatatcgtccttgatttcaaaaataaacgcattacgcttcaatatgacatcatcaccgcacagcagataaaaaaagtgttgtatcgcgatgtatatataaaaaacctgaagatgccgggggccggaatttatacatttgatgttgattcggtaaaggtgttttctactgatactgccggtgattttttagcacattttcgcttgctgcaccccggtgccgctaatgaaataagagtcaccagagtcggtaatagcacctatttgtactcaataaatcgtcagatatataacgtttgtaccttgcagtgaacctgggtttgcgttgctaataggttttttatctattaatatcaatatcttactaaatcatactttttctgaaagtgacggtaaaatatatgtaagactaatttcataattttctctcgaattttatggttatattgctgccgcaatcggtcttctacggtgattgcttgttgataagcattgagttatttaccagtaaggagctttacatgcagcgtattttttcaccatggattatggcagcactattattttcgcccgcattagcggtagcgatggaaaatcataccctctcggttggctatgcccaaacgcaccttagtgcgttaaagaactctgccagtaaagatcttcgtggcctcgcactaaaatatcgttatgagttcaattctgactggggggtattaacctctcttaccgccactcgtcatgaagtacaaaattacaagtgggacgcggggaagttacataaagatggggataatactaccagctatagttcgttaatgattggaccgacctatcggtttaatgactatattagtttgtatggtaatgtcggcatggcagaaatgaagataaaaaaccgggataatcattcctcttcagaaaatgcttttgcctatggagcaggcgttatttttaatccattaacgaatctttcccttggcctctcatgggaaacggccaaattacttttcgttgatacaaatacatttggtgtgagcgtaggttatcgtttctaatacctaaaacgcctctgtttatggcaaggaatacattatctcaaaaaaataaaatatcatgacgacgataagagatattatggacccttaagatagttatacttgatggtagtttaaatcgtaaatctccctggagctccctgggaagtatattttattgccagcacaatgcgcctcaacattcgactggtttcgcaactattggattatttttagcagaattgattaaggtattaacatgaacaaaaaaatggtctttctggccgcttttatgctaacagcttgtagcgctaactccttacaacatggcgctgagggagtacgtataacacataacgaacctgatgcttcgtgcacctatttaggggacgtgactggtagccagggtaattttttcacgggaggatggacgtcaaatagcaacctcgagacgggggcccgaaatgatctaaaaaataaagcgtggaaaatgggggggaacgtcgtggtactgttaacccaaagagcgggtcagaccggtagcgtctatcatggcacaggttcaagccagcaaacaaacgttacattaagcggcacggtttatcggtgtcggtgataatatctctatcttgataacctcctgaggataatgcaggtagtaaagtttaaactatgctgcctgttcaactccccctttctttataactatatagcgaagtggttagtagcggtgtcatcgacccatcatttctatcggggaatgtttattgcctgactgatagcgtaaacctgtggcgattcagaccacttaatggatgattatgcccaaaaaatagcaggtgatgagtcaccctgacaaatcatccatagctttagttagcgcaatacagtagtggccttgaaccaacttttatcaggaagctatgttcattttgttttgagatgatatagcttattttttcatccggataaacgtaaaaatctggcaggatggtggccaggaacgtatccgatacagaatcaatgttaccgtatcggtttatttctcgggagtggaaatgatgagattcatgatttttgaccatatcataaatgacgtctcttctgatgtggccctgcagtttccctccatccagataactaccgctgaccgcaacagtgcccttgctttcatcaagcgaatacatgaaatttaacgtcaagttagtttgtgtattacccttgaacacgacgagcgatgccgtgcactcttccttatgatgtattttatcattcagtaaattataaaaaaggcccagtagagcgccagaaataaaaaagccaaaagcaaattttattctattcatatactattccacgaaaagagagagtaacacatccggcagaaaccttctcgctgtaactttttctgcaaataaagactataaatccgggagacatttgcgacatcgaaaaataaacgaagggatacttcttacaatcaagtccggatttgaatatcaaagatttataatagttaaatttatcaactttagcatggttatcatctttggtataaaaatgacacccgcgatcgttttcaaccaatgtatagctgctaaaaaaaggtttttcatcatgaaaatgccaaatgtaatgaaaagacaaacaacccgccagtaaacttaacagcatgatcaagaacgttgtagcctttgcaccgatgttttttctggtggccgtttgcacgatatcaccaggctctgtggtcggatttttttcagcgacgtcatcctggcttatgatggtgatgtcattataactttctgaattcaaaggttttttatccatcctctcaacgttaacgttaggattgatatgaaagccttttcgcggaaccgtcacgactatcgaattatccgtttccccgacatcgcgcagtccgcgcctgactatcgatatgttttgatacagggtatttgccgggaccagaatcccttcatcttcccacacttttttaaagaaaacttgctgactgaccagttccggagtggcttccagtaaaagaacaagacagtggcttgccggagccgtcaatgtgacgctttgagccgggtttttcaacgagattaaccgcttattttcaggccaaaattctatatttttgtttatgatccaatacatatgctatacgcggcttatatgttaaaagagattaaaggagtaaggaggtaatcggtgttgatggaattacgatcattatagctaaggaaggtgcgaataagcaggtcatttcttcccaagctgactcgctgattaaaatttcgcggatctgggccgatttttttcccgcaaacacatcgaatcagcctatttaggctattttttccaccatttctggcgttatttccggtttttactgagatctctcccactgacgtatcatttggtccacccgaaacaggttggccagggtgaataacatcgccagttggttatcgtttttcagcagccctttgtatctggctttcacgaagccgaactgccgcttgatgatgcgaaacgggtgctccaccctggcacggatgctggctttcatgtattcgatgttgatggccgttttgttcttgcgcggatgctgcttcaaggtttttaccttgccgggacgctcggcgatcagccagtccacatccacctcggccagctcctcgcgctgtggcgctccttggtagccggcatcggctgagacaaattgctcctctccatgaagcagattacccagctgattgaggtcatgctcgttggccgcggtggtgactaggctgtgggtcaggccactcttggcatcgacaccaatgtgggccttcatgccaaagtgccactgattgcctttcttggtctgatgcatctccggatcgcgttgctgctctttgttcttggtagagctgggtgcctcaatgatggtggcatccaccaaagtgccttgggtcatcatgacgcctgcttcggccagccagcgattgatggtcttgaacaattgacgggccagttgatgctgctcgagcaggtggcggaaattcatgatggtggtgcgatccggcagggcgctatccagggataatcgggcaaacaggcgcatggaggcgatttcgtacagggcatcttccatggcaccgtcgctcaggttgtaccaatgctgcatgcagtgaatacgcagcatggtctccagcggatagggccgtcggccattgcccgccttgggataaaacggctcgatgacttccaccatgttttgccatggcagaatctgctccatgcgggagaggaaaatctcttttcgggtctgacggcgcttagtgctgaattcactatcggcgaaggtgagttgatggctcatgatgtccctctgggatgcgctccggatgaatatgatgatctcatatcaggaacttgttcgcaccttccctaattatatgattgagaaaacatatgtgactccttaaattttaatacttcgctttccgccctgtcgaacgccgcataaagcaccatcatcctttcgcgtattagctgggtaacggtcgtaaattcgctgaactctgggataaacatctgcatttaaaacgcaataaacctagtaactacaattggttattgtctaatctatgcttttttagccagcatccaagagcatcgtcatccttagcgtagaaagcctggcatcgggataacgatggtttcgtgttaaacaagatgttttttgctgatgggaacccgtagccctcttcttgcgcgatataagaatcgtttatcatgtctgcctggcacgtaggggcggcgccggtgcggcatttgctaaggttggtcattagttctgttttatttattataaccaccattattcaaggtttttaatgtattatttaatttctcattcgacaggtgtttattatatcgtggctatgttatgatcaaaaaaaaggaggaactatgttttcttatattatgctgggaaccaatgaccctcaagcttcatataaattttatgcgcctttgatgcgtgtgcttggtcatcctctggatgggcgtagcgaaaaaggcgccgcatggggaacattcaaagataaccatactaccggattatgcgttggcatgccgtttgataatctacccgccactcgcggcaatggcgttatggtagcgctgaacgcggtatccgttgacatggtccaggaactttatcgattagcgatagagaatggaggagaggatgaaggtccaccagattatcgtccacattacggcgctgatttttatagtgcttacgtacgcgaccctgacaaaaacaaaatcgcttttgttttttatgacgcgtctaaaagatagaatacctaaaacggtttcctgcggataaaactacctctccctgtgatactcatttttttagcggtctgggaagccgttataatggcttcccgcttgaataactgaatggtatatctctgcaaaatcactgatgaggcatcgagagttaccggcaggcaatcgcgtcaagctgaaagagcatacctgcagctcctccatcatgggcaaactcggtttggatagattttctggctggataattgccgttaaatctctggcgcatgatcttttccattattgggatattccacacgtcacgaaacaaagcatcaattttaacaactgactccagcgtcaggccgatagcgttaagcctttcactcaagttatcgaaggcaccatttatctgttcctcgataggttttccaatgttcccgagacagtaactcacaaagaccagaccacgggtttcgaccacaccggatattgccaggctttcattgacttcgtgccttataatagtaaccattattaatccctttaaatttaatagactgaaaggaagactggttgcaaccctcaagtgcatgccaaactcatatgctcgataacgtattatccccaaaatgcaacatagtaaattcttgagttcctgtgttagggataaatttgtgacctggggattaaatatattttaacttgaacaaatcatctcacttaacgctgaacacgtcacgctcatgccacatgaaacgcccttaaaaaatcttaaaggttcttaattattacttaaattcttaagggtttaacttttaacttgttgattaataagggtatggtgcgttttatgtctggccattcaattattggtgtgaagggggcgtgagatattaatgaacacccgcgaaatttttttgttaataatattttaaatttgaatgcgtatttaaacgaaataataacatgacggttaaggctgtaaccaataaaaactcaaaactcaaaggagcgcttgctattttgaaaataaaaaaaacaaggtaaaagaagaggtaatggcattacgcattatgataaatgtacatcgagcccttttacacagtcgtaaaagtcatggcgcatcttttataggctggaagaaggattttatcaggcgctaatgatgcacagttaaaaattcttaataagacgttttcaggtgcatggcaataacgtgggcgttatgttgctgctcaaggccattcatatgatatggctctgcaacactttatagcaatatgccccgaagcacctcggtggcttatattaaggataatgatgtatgaaaaaattatcagcagctgcgtttgcatttggtctgttatctgtgtctgtatctcaggcattggcggcggatgccaccgttaacttcagcggaaccattcttcaggaagcctgcagtgtagatacttcagacaatactgttaacgttcagctaggcacctacggtgctgctcaattcccgacggtagggacaacgacccttcctgttcctttcgccatcaacttaacgggttgtccggcttcaggtggcccgacggctgcactggtgaccttttcaggggccgcggatgcggccggtgacctggcgttgaccgcaggcggcgcatcgggcgtttccattaatatcaaaaaagcagatggtaccaacattgatattaactctaccgattccggtattgcactgactagcgctacgacccaacagctccgctttaccgctaattacatcagtactgcggcttctgtcaccgcaggcgcggctaacgccgtcgcccaggtaaacatctcttatatgtaatttttgacatgcagcggaggtggtaacacctccgctaccggagtattaatgaaagcgttacttgttttatctttaatgacgtcatgtttgattttttcaataaatagtcatgcgacggtttcggtcggcgggacccgcctggtttttcatggtgatgaaaaagaagcatcgattactgtaagcaatacggacaagggcattcccgttcttattcagtcatgggtggacgaaggggagaatagcaaagctaaggctccgtttatgattaccccaccattgtttcgtcttgagcccggccaggacaatactttgcgcgcggtttttacgggggcaaaccttgcgcaagaccgtgagtcattattctggctaaacattaagacgatcccttcagttaaaaaaaacgaggtacaggcaaatacattgcagttggcgatcaaaaaaaggctgaaatttatttatcgtccttcagctgtaaaaggcttgcctgaagaaaacgcggataaacttgtctggaaaaaaatcggtaaccagattcaggtgactaacccaacgccgttttacatgaacttcagcgtcattacggtgggcggaaagacgtttaaacccaccttgccagagcagacctatgtggcaccagcaacagaacggctatttaccattcctgcaggagcagtcggtaacactattagctggaaaataattaacgattacggtacgagtggcaaagagtttcactcaaaatattaatttcttctgattacatctgattaatgggtatggaattttgggtcagttcaatttcaatatgaaatatgcatgcctcttgatgatgtctgcgctattcaatgctccagccatatcgtttgcggatgagttttttaatcctgctttgcttgaggttcgcgaaggagaaggtgcgccgacgacagacctctccgtatttgaagtcgtcaatggacagccagcaggaaactaccgggtagatatctacgtcaataacgaaatggtgaccgcagatgcccgcgatgtgatgttttcaaagaaccaggatgggaagctggagccctgcgtcacgttggcagaactcagccaatggggagttgatacggcctcatttccagaactcgccgtcagtgatagcgaatgcgccaatcttgcgggcatccctgatgcatttgccgacttccagtttaaccgccaaaagctgaatctgagtatccctcatgcggcaatgaatacgcgcagcctggatgaagtgcctattgaacgttgggatgaaggtattccagcccttctcctcaattacaacatgaatagctatcagagccgatataagggtgcagaaacttacgaaagcacgtatttgaacctgcgtcccggtctcaatatcggtccctggcgtctgcgcaactacaccacctttgagcatagtaatcagagtggaagtaaatgggacaacgtctatagctatcttcagcggaatattgtctctttgcgaagccaactgacgttaggcgacagttcagcaccagctgatgtcttcgatagcgtgccgtttcgtggttttcagatggcctcggatgatgacatgctgccttccagcgtacgtaactatgcgcctgtgattcgaggggttgcccgcagcaatgccctggtcaccatccgtcagaatggttacgttgtctatgagaccaaagtggcgccgggggcgttcgagatctccgatttggcctccaccggaggagcaggcgatcttgacgtgaccatcaaagaagccgacggcagcgagcagcacttgcgcatcccctacgcatctttgcctgttctacagcgtgaaggtaagtttcgctatagcgttacgggcggtcaattccgcgcctacgattctcacacggaaaaaaacctgtttgttcagggcaccggaatttatggccttccgtggggctttacgctctacggcggcgtgcaaaatgcaggcaataaatatcagtcatatgcgttgggggtgggtaagaatatcggtagctggggcgccttttccgccgacgccatccattcccgatccatgtcgaccgatgccggcaggcaacagggccagtcgctccgggtgcgctatagcaaaaatttcctgcagacgggaacaaattttaccatcgccggctatcgctattccacctccggatttcgctcgctggaagaaacgctgggtacctaccgtagcgataataacattccttcttatatcaccgatcgccggcgtaaccgggctgagctgtcgctgaatcaggatcttggcgataactttggggcgttgaatgcatccttgatcagcgaggattactggcagaacgaacgtaacagcctgtcggcaaatctgggctattacaaaaatttcaacgcgattggtatcagtctgaactactcctggaaccggaataccgggctctatggccatgccgaacaggataatgtggtctcctttgagatcaatgtgccgctggacaaattcctcaaccggacatacgcctcatacgggacaacccatgcgagtggaaacggaaccagccacaacctccgactgaatggttcagcctttgatgatgccagtcttgactgggggataaacgcgacgcttgcggggcgcagcgaacaacaagtcgtcgggggtaacgtcagctggaaggcaagccacggaacgttaaatggttcctacagccgcagccgcgacagccaacagctggggtatggcatagccggtggggtagtgattcatgagaatggtatcacgctgtcccaatccctgggtgaaactattggtttagttaaggctcctggcgcagaaggcattggcgtcaataactacgccggtatctctacggatagtcggggttacgcggttgttccgtatctgaccccctatcgccgcaatgatattagcctgaatagtaaaaccctgcgggacgataccgatatcacctatatgaccaataaagtcgtccccacccgcggggctatcgttagagcagagtataaaaccgccattggccaccgtgtcctgatgacgttaacgcggcctgggggaaaaccggtcccctttggcgcgatggcgtcgctgcttaaaagtgaagaaaacgcgtcaattgtcggtgacggcggagaagttctgctgagcggtttaccgcaaaaagggacgctgcaggtgaaatgggggaatggccaggggcaggaaaccacctgtcgggcggattatatagcccataaatctgctggcgcgtccggtctctggaacgcgacgagcgtctgtcaataactctgcgcccttgagcaaagtaaatagccgtccttacgaggaagaataaaatgaagtggtttgtttttatgttcgcggcaatcgcggcgacgctgatggtcacccctgaggctaatagcggatcgtttgatccggtaactggtgcttatactacggatccgataaccgtcacgctgacgccaaagaccgtagctgtcagcacgtcggtaatcgcgaatggtgaaagggtttactgggccactgataaatatccccaaggagcaggtacgttttactggggatcgcatacctacaccttggaaagtgcctctgacgtcacattagccattcccggtataaatgccagcggagtctgtactgcaaccggcagcggtacatctcttaccataaacggatgtttttccttttcacataatggcacgatctacatgggaaaaagcgcctcttgtaaatccttttttagtttacagagcaatttaagttctttaacgaattttggcgattttgtcgcacttactcttggccctggtacaaacactatccagttgaacaagacaggtataacagacgtcaatactacctctttcacctatccaagtacgactcgatcaacaagttaccgctggacaacttacgatataaatctacaggcaacactatctgccaaaacgccgccttatacctatctttactgcagcgtatcgcaaggcctccgggtcataatgaccactgggggagtagttcctaatccttttgcgatggtgcctgcggccagtaaacccgcgtattccccgacgattagttactcgccagcgctccctatcatcaatactatcgccgtaaatatccgtaatatcaccgcgattgacattctcccaaggacggtatttaacaccgggactatctccgcctggcgcacaacctatatggaacaaccgcttaccgtaaccgggcaggggaatatcacccgcgattttggcgcatcccagaactttaacgttcttgaatcctggacctgcgcgacaacagggcaaatcgattttcgaataatgcgcgacaataccaacgccaacgtctgttcgggggcgacctatacccatccggtgcagacgccacagtcgttgacggcgcagtggaaagcgcaaagttcgaccgcatcaggcgcatggagcgccagggctacggtgacctttacgctgccgtagagtattggcttaatcgtaacgcccggcatcgttttatactggcgatctcgccgatggcacgagcgcgcctcgcctgtcgctcaaagagaatgaccctgacacggcggccagcagtgaccgcgcgctgcgtttaagttatacccaaaacaatatgctaaaaacggttaaaacgacaatacaagcgatattcaaaaacaggccgccatgcatcatctttgcctttatcccaatcgacctgttcactattcatttcaaaggttcccttaagttccggcctgaataagaggtaaagaatcgcaatagcgacaagcagtaaaacgatcattgccgggaaaccgcccttcatccagtcaaaaaaggagagccccacctcggcggcggcaatcgcattcggtggactgacgccatcccgccgatgagaaaatttttttatttaataaaaacaggggcatgttgaaacgggatgcatttgatggtgccgataataggagtcgaacctacgaccttcgcattacgaatgcgctgctctaccaactgagctatatcggccctgcaagaggtgttcacgagcgtgaatcacgaggcaaaaggttagaacttagcgggcgatgcgtcaatagccagtggaatcaactgcctatttttgcatcgcccgttctcatttacgcacgaatggtatcgtcgccgaaaccaatccacttataggtggttaacgcttccagccccatcgggccgcgggcgtgcagcttctgggtgctgaccgccacttccgcgccgaggccgaactggccgccgtcggtgaagcgcgtggaggcgttcacatataccgcggaagagtccacttcattgataaagcggttggcgttacgcagggtgcgggtcaggatggcgtcggagtgctgggtgccatgttcgcggatatgggcgatagcctcatccatatcagccaccactttgacgttcagatccagcgacagatactcgtcgtcatactgctccgctttcaccggctcgaccttcgcagggccgttttgcagcgcggggagggcggaaggggcggcgtgcagggtgacgccgctctcggccatctgcttgcttaacgccggcaggaaggtgtcggcgatgttgcggtgcaccagcagcgtttccacggtattgcaggtgctcggccgctgggtcttggcgttgacgatgatcttcagcgcgggggggatctcggcggtttcatccacgaagatatggcacacgccaatcccaccggtgatcaccgggatcgttgactgctcacggcacagcttgtgcaggcccgcgccgccgcgagggatcagcatatcgatgtatttatccatcttcagcatttcgcccaccagcgcgcgatccgggctatcgatagcctgtaccgcggcggccggcagaccgcactcctgcagcgcctgctggatcaccttcaccgtggcggcgttggtgcgccaggtctctttcccgccgcgcaggatcgccgcgttgccggttttcaggcacagggaggcgacgtcgaccgtcacgttgggacgcgcttcataaatcacgccaatcacccccagcgggacgcggcgacgttcaatacgcagaccgctgtccagcagcccgccgtcgatcacctggccgaccggatcggccagattgcacacctggcgcacatcgttggcgatgccgctcagacgcgccggggtcagcgcgaggcgatcgagcatcgcttcactcaggccattggcgcgagcttcggctaaatcttccgcgttggcgcgcagaatatcgtcggtctgcgcttccagataatcggcgatcttttccagtacctgattcttttcccggctggagagtaacgccagctgccaggaggccgctttggcggcaatgcccatttgttccagcattttcagctccttaacggatgatcatatcatcgcggtggacggccaccgggccgtattcatagcccagaatggcatcgatttgctgcgagtgctggccggcgataaggcgcagcgcatcgctgttgtagcggctgacgccgtgagcgatgtcgcgtccttcgctattgcggatgcggatcacttcgccgcgggagaaattgccgctgacgattttgatcccttttggcaacagcgagctgcctctttcgaggatcgcctgggtcgcgcccgcatcgacggtgatttcccccgccggcggcgcgccgaagatccagcgcttacggttctccagcggagactcctgggcgtggaagcaggtacctaccggcaggcctgccatcgcatggccgatgacgtccggacggttgcctgcggcgatgatggtatcaatccccgcccggcaggcgacgtccgcggcctgcagcttggtgcccatgccgccggtgccaagtccggagacgctatcgccggcgatggcgcgcagcgcgtcgtcgatgccgtagacgtctttaatcagctccgcctgcgggttgctgcgcgggtcggcggtgaacaggcctggctggtcggttaacagcagcagcttatccgccccggcgaggatcgcggccagcgcggagagattgtcgttatcgcccactttgatttccgcggtggcgacggcgtcgttttcgttaatgaccgggacgatgctgttatccagcagcgcgcgcagagtgtcgcgggcgttgaggaaccgttctctgtcttccatgtcggcgcgggtcagcagcatctggccaacgtgaatgccatagatagaaaacagctgttcccacagctggatcagacggctttgtcccaccgccgccagcagctgcttggaggcgatggtggcgggcagttccgggtaaccaaggtgctcgcgcccggcggcaatggccccggaggtcacgatgacaatacggtgtcccatggcgtgcaactgtgcgcactggcgcacaagctcgacgatatgggcgcggttcaggcgacgggacccgcctgttaaaacactggtgcccagttttaccaccagcgtctggctttcactcatgattctctgccgttcaaaaggaatatcgatatcgagctgatgttgtagcaggagtcggcccgcttgccaacacccggggcggcgggcgcgccattttattgcgcgggatcgggcattctggagagggaatgtgacaaaaatatgtcagatacatttaaatacccttttttataaaaagttccatcttgtcataaatatttaatatcccggcgttaaaaaacctccagtttttgatgggcgagcgcccgcaattgaatagcgcgtataaataaatcaccaggactgaataatgaaaaagagtactctggcattaatgatgatgggctttgtggcttcaacagcgacgcaggcagcggaagtttataataagaacgcgaacaagctggatgtgtacggcaagatcaaagccatgcactatttcagcgactatgacagcaaggatggcgatcagacctacgtgcgtttcggtattaaaggcgaaacgcagattaacgacgacctgaccggctatggccgttgggaatctgaattctccggtaacaaaaccgagagcgactccagccagaaaacccgtctggcgttcgccggcgtgaagctgaagaactacggctccttcgattacggtcgtaaccttggcgccctgtacgacgtggaagcctggaccgatatgttcccggaattcggcggcgattcctctgcccagaccgataactttatgaccaagcgcgccagcggcctggcgacctaccgcaacaccgacttcttcggtctggtggatggcctggatctgaccctgcagtaccagggtaaaaacgaaggccgtgaagcgaagaaacagaacggcgacggcgtcggcacctcgttaagctatgatttcggcggcagcgacttcgccgtcagcgcagcctacaccagctccgaccgtaccaacgatcagaacctgctggcccgcggccagggttcgaaagcggaagcctgggcgaccggcctgaaatatgacgccaacaatatctacctggcgaccatgtactctgaaacccgcaaaatgaccccgatcagcggcggctttgccaacaaagcgcagaactttgaagcggtggcgcagtatcagttcgacttcggtctgcgtccgtccctcggctatgtgctgtcgaaagggaaggatatcgaaggggtggggagtgaagatctggttaactacatcgacgtgggcctgacctactacttcaacaaaaacatgaacgccttcgtggattacaaaatcaaccagctgaaaagcgataacaaactcggcatcaacgatgacgacatcgtcgcgctgggtatgacctaccagttctgattgaccgcagaaccacccgccgcagccctggctgcggcttttttttagcggcgattcttcgccagatgcagggtgtcgctgttcatggtgatctgcgcgttatactccttcggcagacgacgcgcctgatagaacgccgattcccagtaagggttgtccagcgaagagcgcatcacgccctggctgctcgaggcgtgaaggaaattatgatcggtatcgtaaaagccaacgtgcatcccggcccgggtgcggaagaacaccagatcgccgggacgtaaatcgcgcttattgacccgcacgcccatgtgcagcagctcgcgggtggtgatccgctccatcggcaggttaaagcgatccttcagcgtgcgccagacgaaacccgagcagtcgacgccgctttgttcagtaccgccccattcatagggggttccctgccaggtgtgcatctgatcatgcagggccgccaccaccgggatcagatcgtccgatccgccgtcaatggtcatatccgcatgagattttgtgttctttgcctgtttcggtgaggaggagcatcctgccaacaacaaaaaaggaattaaaaagagagcatgcgtcagttttggcttcatatcgttattttcgaagtagcaagcagactgctttgttttatagccgattaaaaaccacggctgaataagccgaggccgcctttacgtttatttacgattaaaaataaacaacctcgggatggagcagccataaagggcagttgtcacttcgcaacggtctgtgccaggatgctgacaggaacatttcacgaggcattccatgacgcattacgccatctctagcgagactttgcccggcgccgctttcgacgcggggtggatgacgtctgcgcctcatcatcgcttcgccacgctctgcccaccgcctccccctccagaccgggtagttttcggcgcttaacgccgtctttagcaggcgcttacctgccggtatgacgcttgataccttgtgtttgacgttctggagcatgctatgcacgttcgctattctctgctcgcctcgcaggcgacaacggccctttttgtgctgctgtggggcagcgcggccatcttcacccgctggggactggataacgcctcgccgatggcgctgctggtctttcgttttctggttgccctggtcgcgctggcgccgctggctatcgtccgtcggcgctggctgcccgcgccgggcacccgcctgcaaacagcggccaccggtctgatgctgattggcggctattcggtctgttacttcgaggcgatggccaacggcgtgacgccgggacttatcgccaccatcatggggatccagcccatccttacgctttgcgtggtggagcgccgcctgcaggggcggcggctgtcaggactgctgcttgccctggcggggctggtgctgctggtgtggcgcagcctggcagcctggcggcctcgccgatggcgacggcggggatcctgtttgcgctggcggcgctgctgctgatgacctttggcgcgctgtggcaaaagcgcagccgtcaggcgccggcggatgtcctgccgctgcagtatgccgttagtctggggctgtgcctgctgattgccccggtcagcggcttccagtttaccgttaacgccgggttgattattccggtgctgtttctcggactgctgatttcggtggtcgcccagctactgctgtaccgtctgctgagcgcgggaaatatcgtcaatgtcaccagcctcttttatctggtgccagcgatcacggcgctgctggattatctgctgctgggcaaccggctgccggcggcggcgatgatcggtatgatggcgatcgtcggcgggatcgtgctggtgttccgcaccgcgaaggtccgcgccggctgatggcgagccgggcgctgcggcgtccggttcattttcctgtcatcttttttacgcatgctcccggcagtttattttgaccagtaagggaaagtaccatgggcaacacgctgacgatttttgatctcgataacaccctgatacagggcgatagcagtacggtctggagccagtttatggttcgcgaagggctggcgacgcagaaggggtatcttgcccgcgaggcgcggctaatggcggattatgaccggggagagatgaatatcgccgattatgtggccctgatccaggcgccgctggccggaataccgaagtcggacgttgacgcgctggtggcccgctgcgtgcgcgaggcgatcctgccccgggtctatccgcaggcgtgggagctcattcgtcgtctgcgggccgagggagagcagatgctgattatctccgcctcggttagcctgctggtgcaggcggtggccgccgcgctggagatcgatcaggcgctgggtattgacgtggcgatggtcgacggcggctacagcggtgaaatcaccgggatccccagctatcagcaggggaaggtggcgcgtctggcgcagtggcgcgaggcgcatccgcagtatgacggcgaggtgacgttctataccgattccattaacgatctgccgctgtgcctgcatgcggatcgcgtgcggctggtcaatccctgtccgcagctgcaggcggccggtgccggatacggctggccggtgctgagctggcggctggaatagcggagcggataaatgcttgccgggcctacagacagtcggagccggacgagtaggccgggtaaggcgcagccgccacccggcataaacgcagctccgtgcctgatgccatcgcccggcggcgctgcgcttaccgggcctacgaggtgtgatcgtgtgagaggccccggtaggccgggtaaggcgtagccgccacccggcaataaagcggctccgtgccggatggcatcgcccggtggtgctgcgcttaccgggcctacgaggtgtgagcctgtgagaggccccggtaggccgggtaaggcgctagccgccacccggcgaaatatcggcgcaaccggaaatgtccctgcccgcgctgcgcttagcagggctaccatccagggctatttccgggcagattgcgctcccgatatgtcttctgcgctatgtcacttatggcgcctggagcgcacagggggcggccagtcgccgccgccccctgtacccccgggctccggccagcaacatcgccgctgcgcggtcccttcgacttatccctgcaggcttcgggtcgggccgaggcagcgtccatgcaaaacacggccctcagcccgcatccatgcgggctgccccggccttccgggaacgtctcagcgatgttgaggccgccagcaccggcagtttcagcagccccagcgccagtggtgatttggggttgtaggccgggtaaggcgcagccgccacccggcataaacgcagctccgtgcctgatgccatcgcccggcggcgccgttgcttgccgggcctacagacagtcggaaccggacgagtaggccgggtaaggcgcagccgccacccggcataaatgcagctccgtgcctgatgccatcgcccggcggcgccgttgcttgccgggcctacagacagtcagagctggacgagtaggtcgggtaaggcgtagccgccacgcggcataaacgcagctccgtgccggatgccatcgcccggcggcgccgttgcttgccgggcctggagacagtcggagccggacgagtaggccgggtaaggcgcagccgccatccggtataaacgcagctccgtgcctgatgccatcgcccggcggcgccgttgcttgccgggccaacagacagtcggagccggacaagtaggccgggtaaggcgcagccgccacccggcataaacgcagctccgtgcctgatgccatcgcccggcggcgcagtccaagttgcttgccgggcctggagacagtcggagccggacgagtaggccggataaggcgaagccgccatccggcgcaaatgtgcgctagcgtccgccctgatacagcggcaccgcggcgccgccgatatagcgacggcgcagccaggcggagagggtgtccatgatcattaccaccgccaccagcagcagggtgataaacatcaccacatcccagttccacagacgcatattctcggcatagataagcccgataccgccggcgccgacgaagcccagcaccgccgcggagcgggtgttggattcaatctgatacaggctcagcgcgaggaaggtcgggaacgactgggtaaaaatgccaaagcgatgcttttgcaggccattcgcgcccacggcggtcagcccgcgcccgggagatcggtccacggcttcgtgtccttccgcgtacagccgtcccagcaggccggtgtcctgcatgatgatcgccagcacccctgccagcggcccgaggccgaccgcacgcacgaaaatcagcccccagatagccatgtcgatcccgcgcagcacatcaaacaggcggcgcatcagcagggcgaggggccccagcaccacgccgcgcatgatgttgcgggcggcgaagaaggagagcagcagcgccagcaccgtggcggtcagcgtcccggcgaagacgatggccagggtgacgccgatttgcgtaaagtaatagccgaacggccagttccagaagtcgtgccagaccaacatccgcgccaggtagcggccaatctgctgcaggccggtggtcagctgttcgccgctgacgccgaactgcagaaaaaaccagacgtaatagagcaggcaggccagcgccaccagcccgacgtagcgcaggtagcgcccctggacctgatagagctgcttatgctgccgccggctggcggcgatatccggttgcatgtgccagacgctcattttttcccctccagtacccacaggcgcagacgaccggacagcatgtccagcgccgacaccaccagaatgatcagcagcagggtgatgctcacctgatcgtagcggtcgagcttgatgttggtcatcagctcctggccgatgccgcccgcgcccaccagcccgagaatcgtcgacgagcggaagttgatttcaagccgcataaagccgtaggagagaaacagcggtttcacttgcggccagagggcgaagcgaattttctgcagcggggacgcgccgcaggccgccaggccgcgtaccggtttgttttgcgcgctttccaccgcctcgtagaacagtttggtcaggctgccgacggtatgcagcatcagcgccagaaagcccgggatcgcgccgatgccgaacgccatcacaaagatcaccgcccacgccagctcgggcatggtgcgcaaaaacgccaccagcacgcgaatggcaaagcgcaccggcgccggggtccaggcgttattggcggcaagaaacgcgaaaaccgtggcgatggcgaccgccaccagggtcgaggccagcgccagctgcagggtttcccagatcagcggcagctggatcggcaggcgatagccccaccaggccagcgaccctttggtctgcacatcggcgaacaggttgccagcgctcaggggcggaatggtctctgccatatagtcaaagaagtggggcagcgagtgccagatagtcagcagattaaattccgcggcgctgccggcggcaaaatagagcgccagcagcagaagcgaccagcagacggcatcgcgcttttgccgcgagcgtacctgctggtaatagcgttcaaattcggtgtgggttgtcttcatgcgtcggggatcttcaacgtagcgccgccgcttaccctggggcaagcaggcggcgttgaggcaggattaacgcgcgctcaccagctcgcgtttcatatcaataatctgctggaagtcagccacgctgcccgggccgatgtgctgagtaccgcccatcgctttgataaagcaggcgtgatcctcggtgtccagctttttcactgccgccacgaccttcgccttaaagtccgccggcagcgcattgctcaccaggatcgggccgttcgggatcagcggcgattgccagataatgcggatctgcttcatcagatccggatgatccatgcgaatcagccggttgaacgcgccggtagtgtagccggtgttgtaatcgccaaccatcgaggcccacgtgaccgcgcccgcgaactggccattcagcacgccgaggatgtcctgctcatggccgccggagaaggtgacgctggagaaggtgttgttgtatttgttgtcggcgttaccgccaaatttttctttaaacgcatggttagggatcagatacccggaagtggaatccggatcggcgaagccgaaggctttgccttttaaatcgtccagcgttttgtacggggagtcggctttgacgatcactactgagtgatagccgcgagactgatctttgtcgtccacggcgatgccgacgatatccaccgctttcggattattgagataaaccgaggcgtaggaggagggggacatgctcagcaccacgtcgactttgccccccagcaggccctggatcaccccggaatagtcggaagagttgcgcagtttggtatccacgttcagctctttatcgaggaaggccttcacgcactggttatcgccgatttgctgggtggcgttctggccgccgagaatgcccaaattgagctctttcggctgcgccgccgctgcctgccatgccatcatcatgcccgcgaccattgcggataaacgaactgcgccagtcatatattttttcattatgttgcccgtgtgagtgaaattaatgcaattggctaacttcatcgccgtacagccgctgcagcacatcctgcgtcagccgggaggggtgatcgtcaaaaataagctggccgctggcgacgccgataacccgggtgcagtaggccctgaccagctccaccgaatgcaggtttaccatcacgctgataccctgctcgctaatctcgcgcagcacatccatgatgcgctgagtgtttttcggatccagcgaggcgacaggctcgtcggccagcaggatcccggggttttgcatcagcgcccggcagatcgccacccgctgcatctgcccgccggagaggttctccgcccgctgcagcgcgtgcggcagcatgttcatccactcaagcagcgcaatggcgcgcgcccggtcggctgcgggaaagattttaaacagcgatttcagggttgaagtctggctgaggcggcccagcaggacgttggtgagcacgtcgaggcgcggcaccaggcagaagtcctgaaaaatcattccgcagtggctacgccaggcattgagcgcgcggcctttcagctgtgagacatcgtgcggggtaccgacttccgggtagctaagaatttctccgccgctggcgctgtgggtgccgttgaggacatgcaggagcgtcgatttaccggcgccggagcggccaatgaccccgaccatttccccggcgtgcagatcaaagctgatgccgtccagcactttgtgctgggcttgataagctttactcagattacgcacgcttaagaccttccgctgccggccggcagcgagatcggtgaacggctggaaatcagtttcggccaccgcggcaagagagctgttcataagagtgtccaggttcgtcattaactggccactattaataggtctttatatgaaatttcgatgacggtattgcgaacaaagcgtgaactggcgtgaaagagcgacggccagcggctcaacgcgtgcggcatgctggcggctggcgaagcgccgaaaagccgctatgctttggagggcgcggagacagaccggttcgtaggcgtaggcagccttcggcaatcttcgcttaatcttgatgaagaagaccgtttaatcgaatagataatgcgtctgcctttgtttagcattcaacatcccgcatgtattaacatatacataactattttgtgcggcaggttaatctattcatgagtcttatgtgttggtgaatcatcctggtttttgtttatttgtagatttatatcctttcttttgtgctaaatccggtttatttgataagccattcaagagttccattaagaatattcctaacataatagggcgaagatcctggataatataaagcgcagataagaattgacggttatattaccaataaccttatgaaaataaatgtctttttctggcgctcaaaaatttgatattttcagtttttgtaaatattgacctgggcgcgaaattcattgcctttccgcatgttgacactccataggaaaaaacttaaattcaacgccaagcagaaaataattatagtttaatcccccgcttatccaatattgataagtaatgcgtgtcttatttaatggcgatttattaaaggaaacgaatacgccagtaaactttataggcctggcaagcagtgacgttgtaaaaatgattacttcaaggactatgaggttaaaaactatatggaatataaaagctgttccgataagtatatttggtctgccgatgactcctatttctataaaggactgtccgaactgattgtagacatcgacgaattaatttatctctcactggagaaaatcagaaaagattttgtgtttatcaatctcaatacggcttcattaaacgaatttatcaggcgcgacagcgaatggctatccgcggtaaaggggaaacaggtcgtattgattgcggccaggaaatcagaggccttagcgaactactggtattacaatagcgatattcgcggggtggtatatgttggtctgagtcgcgatattcgaaaagaactggcctatgtaattaatggcaggtttctccgcaaagatattaagaaagataaaattacagatcgggaaatgaaaattatccgcatgaccgcccagggcatgcagccgaaatcgatcgccagaattgaaaattgtagcgtgaagacagtgtatacccatcggcgtaatgctgaggccaaactgtattccaaaatatataagttagttcagtaacacccaggcaattctgttttttaaatggttcaccgggacatcatgtccttaattcaactcaggatgaaaaagcgatgaaaaaaaaggttctggcaatagctctggtaacggcgtttaccggtatgggcgtggcgcaggctgctgacgtaacggctcaggctgtagcgacctggtctgcgaccgctaaaaaagacaccaccagcaagctggttgtgaccccgctcggcagcctggcgttccagtacgccgaaggcattaaaggctttaactcgcagaaaggtctgtttgacgtggcgattgagggggacacaacggcgaccgcctttaagctgacctcgcgtcttatcaccaacaccttaacccagctggatacctccggctccacgctgagcgtgggcgtggattataacggcgccgcggtggaaaaaactggcgataccgtgatgatcgataccgccaacaatattatgggcggcaacctcagcgcgctggctaatggctacaacgccagcggccgtaccacagcgcaggatggtttcactttctccatcatcagcggcaccaccaacggcaccaccgccgtgaccgattacagcactctgccggaagggatctggagcggcgacgtcagcgtacagttcgacgccacctggaccagctgatccttctgatgcaccagcagggggatctccccctgcttttttcacggacggaattgttatgaaaaagcaccttctggccctcgggctgctgcttgccggggtgtcgccggcgcaggcgctggatgtcggcgatatttcatcctttatgaacagcggcagcagcacgctgagcaaaacgatcaagaacagcacagacagcggtcgactgatcaatatccatctcgaacggctctcttccccgctggacggcgggcaggttatcccgatggacaaaccggatgaggtattgctcactcccgccagcctgctgctacccgcccaggccagcgatgtgatccgcttcttctacaaaggcccggcggatgacaaagagcgctactaccgcattgtctggttcgatcaggcgctcagcgatgcccaacgcgataacgccaaccgcagcgcggtggccactgcttccgcccgcatcggcaccatcctggtggtggcgccccggcaggtgaactatcgctttcagtacgccaacggctctctgaccaacaccgggaatgcgacgctgcggatcctcgcctacggcccctgcctgaaggccgccgatggtaaggaatgtaaagagaattactacctgatgccgggtaaatcgcgccgttttacgcgcgtggacacggcggataaaaaaggacgggtggcgctttggcagggtgagcagtttgttcccgtgaaatagacagctgtgcagatggataacgacgatgcctcaacgatggattaccccaggactgaaaacacggctcgccttcggcatgatctttttgtttgttcagcccgacgccagcgctgccgccgcaggcgcgcagcagattggcggggtgattattccgcaggccttcagccaggcgctgcaggacggcatgagcgtcccgctctatattcatcttgccggcagccagggcatccgggacgatcagcggatcggcagcgcctttatctggctggacggcggccagctgcgcgtccggcagatccagctggaggagagcgaaggtaacgccagcgtcaacgaacagacccgccagcagctgattggcctggccaacgccccgttcagcgagacgctcaccattcccctgaccgacagcgcacagctggatctcagcctgcgccagctgctgttgcagctggtggtcaagcgcgaggcgctgggcaccgtcctgcgctcgcgcagcgaagatatcggtcagtccagcgtcaacgctctcagcagcaacctgagctataacctcggcgtctataacaatcagatgcgtaacggcgggagcaacacctccagctacctgtcgctgaacaacgtcacggcgctgcgggagcatcacgtggtgctcgacggctcgctgtacgggatcggcagcggtcagcaggacagtgaattatataaggccatgtatgagcgcgatttcgccggccaccgctttgccggcgggatgcttgacacctggaacctgcagtccctgggaccgatgaccgctatttcggccggtaagatttacggcctttcctgggggaaccaggccagctccaccgtcttcgacaacagccagtccgccacgccggtgatcgcctttctgccggcggcgggcgaggtgcatctcacccgtgacggtcggttgctgagcgtccagaacttcgccatgggcaaccatgaagtggatacccgcggcctgccgtacggtatttacgacgtggaagtggaggtgatcgtcaatggtcgggtggtcagcaaacgcacccagcgggtcaataagctgttcagccggggacgcggcgccggcgcgccgctggcgtggcaggtatggggcggcagttttcatatggatcgctggtcagagagcgggaaaaagacccggccggcgaaagagagctggctggcaggcctttcggcctccgggtcgctcagcaccctgagctgggcggctacgggctatggctacgacaaccaggcggtgggggaaacccgcctgacgctaccgctgggcgagtcgatcaacgttaacctgcaaaacatgctggccagcgacagctcgtggagcagcgtcggcagcatcagcgccacgttgcccgggggattcagttcagtgtgggttaaccaggagagaacccgcattggcgatcaattgcggcgcagcgatgccgacaaccgggcgatcggcggcaccctcaacctgaacgcgctgtggtcgaagctggggacgttcagcgtcagctacaacgatgaccgtcgctacaacagccattactacaccgcggattactatcagacggtctacagcggcgcctttggctcgctcggcctgcgggcggggatccagcgctataacaatggcgacagcagcgccaacaccgggaaatatatcgccctcgatctgtcgctgccgctgggcaactggttcagcgccgggatgacccatcagaacggctacaccatggctaacctctcagcgcgcaagcagtttgatgaaggcactattcgcaccatcggcgccaatctgtcgcgggccatctccggcgataccggggatgacaaaaccctcagcggcggcgcgtatgcccagttcgacgcccgctacgccagcggcacgctgaacgtcaacagcgcggcggacggctacgtcaacaccaacctcaccgccagcggcagcgtcggctggcagggcaaaaatatcgccgccagcggacgaaccgacggcaacgctggggtgatcttcaacaccgggctggaggacgatggtcagattagcgccagggttaacgggcggatcttcccgctcagcggcaagcgtaactacctgccgctctctccctatggtcgctatgaggtggagctgcagaacagcaaaaactcgctcgacagctacgacatcgtcagcgggcgcaagagtcatctgaccctttatccgggcaacgtcgcggtgattgagccagaggtgaagcagatggtcaccgtctccggccgtattcgtgcggaagacggcacgctgctggcgaatgcgcggattaacaaccatatcggccgtacccgcaccgatgaaaacggcgagtttgtcatggacgtggataagaaataccccactatcgatttcagctacggcggcaataaaacctgcgaagtggcgctggagctcagccaggcgcgcggcgccgtctgggtcggggatgtggtctgcagcggcctctcgtcgtgggcggcggtgcagcagtcaggagaagagaatgaaagttaatgcactgatggcgctggcgatcctcgcgctgctctggccggcagccgcgctcagggcggcggtgaccaagaccacctggtcggatgcgccggcgcgcgagtttgtgtttgtggaaaacaactccgacgacaactttttcgtcacccccggcggggcgctggatccgcgtatgaccggcgctaaccgctggaccggcttaaaatacaccggctccgggaccatctatcagcagagtctcggctatatcgataatggctacaacaccgggctcaatgccaactggaagtttgatatgtggctggaaaactcaccggtttcacaccccttaaccggcctgcgctgcatcaactggtacgccgggtgcgatatggctaccagcctgatcctgccgcagaccaccgacgccagcgggttttacggcgcgacggtgaccagcggcggcgcgaaatggatgcacggcatgatgtcggacgccttctatcaatatctgcagcagatgccggtcggcggcagctttacgatgaccatcaatgcctgtcagacctcggtgaactacgatgccagcagcggcgcgcgctgtaaggatcaggcctccggtaactggtatgtgcgcaacgtcacccacaccaaagccgcgaacctgcggttgattaatacccactcgctggcggaggtgtttatcaacagcgatggcgtgccgaccctcggggaagggaacgccgactgccggacgcagaccatcggcagccgctcaggattaagctgtaagatggtcaactataccttgcagaccaacggcttaagcaacacctcgatccatattttcccggcgatcgccaactcgtcgctggcctcggccgtcggggcgtacgatatgcagttcagcctcaacggcagctcctggaagccggtgagcaataccgcttattactacaccttcaacgagatgaagagctcggactcgatctatgttttcttctccagcaacttctttaaacagatggtgaacctcgggatcagcgatatcaacaccaaggatctgttcaactttcgctttcagaacaccacctcgccggagtcaggctggtatgagttttccacctccaacacgctgattatcaagcctcgtgatttcagcatcagcattatctccgacgaatatacctcggcgccgtcgcgcgaggggtatgtcggcagcggcgaaccggcgctcgatttcggctacatcgtcaccaccagcggtaaaacggccgccgatgaagtgctgatcaaggtgaccggaccggcgcaggtgattggcgggcgttcctactgtctcttcagctccgatgacggtacggcgaaagtgccgttcccggcgacgctctcttttatcacccgcagcggcacgacgcagacctacgatgccgggtgcgatgacagctggcgggatatgaccgatgcgctgtggctgaccacgccgtggaccgatatctccggcgaagtggggcagatggataagaccacggtgaaattttcgattccgatggataacgccatttcgctgcgtacggtagacgataacggctggtttggcgaagtcagcgcttcaggagagattcatgtccaggcgacgtggcgcaacattaactaaggccctgctgacggtgggctgcctgctggcagcgccgctggcgcaggcgatctcggtcggtaacctgaccttttccctgcctgccgaagcggatttcgccagcaaacgggtggtcaacaacaataaaagcgcgcggctgtaccgcatcgccgtcagcgccatcgatcgcccgggcggcagcgaagtccgctcccggccggtggatggcgaactgctgttcgccccccgccagctggtgctgcaggcaggtgagagcgagtattttaaattttactatcatgggccgcgggataaccgcgagcgctactatcgggtctcgtttcgcgaaatccccacccgcaacctgacgaggcgcagcccgaccggcggcgaggtcagcatggagccggtggtggtgatggataccattctggtggtgcgcccgcgcgaggtacagtttaaatggtctttcgataaggtggccgggacggtgagcaacaccggcaatacctggtttaagctgctgattaagcccggatgcgattcgaccgaagaggagggggacgcgtggtatctgcgtcccggggacgtggttcgccagccggcgctgcgccagccggggaaccactatctggtctataacgacaaatttattaagatcagcgatacctgtccgctgaagccccgtcccgcggagtgagccttatctggtggtcgcgcggcgggtaaagcgccggctggccagcaggctcagaccgcagcacagcaggtagtacaccgcgccggtgaagacgaagatcgccaggggatagatctgcacccggttgttgacctggccggccacggtggtcagctctgggacgttgacgataaacgccagcgaagtgtccttcagcaggccgataaagatccccaccagcgacggctgaacgttgcgcagcgcctgcgggagcagcaccaggcgcagcgtttgcccgggagcgaacccctgggtcagcgccgcctcatactgtcctttcggcagcgactgcagcccggccagcaccgagtgcatcaccgaggcggcggtaaaccacgccagcgccagggtcacggtcaccgcgccgggcagatcgccgccggtcagcatcggcagcagataccacagccagaagatgacaaatatcagcgggatgccgcggataatttccgcccacagaaacagcagacgccgcaccagcccgccgtagcgccaggccaggcccgccagcgcaatgcctcccggcagcgccagcagggtggcgccgatggccatcagcagggtcagcgccacgccgccgggctggccctccgctagtcggccccacagcaggtaatcgaggttatcggcgatcaccgccaggttagcgttcatgtcgggcgctccgttgcagttttcttcccgggccgagacgcgtgagcgccacgcccatcgccacccccagcgccaggtacagcgcggtgccgacggcaaacgcctccagggcgtgcgcgttatagctctcaatctgccgcacctgataggtcagttccgcaaagccgatgccgctggccagcgatgagagtttcatcaggttgagatactggccgacaatcggctgccaggcgttggccagtccctgcggcaggaggataaagcgcagctcctgccacggcgtaaagccctgcgacagcgcggcttcccgctgcccgtggctgacggcgcgcagtccggaggcgatctcttccaccagaaaggcggaggtaaagacccccagcccccacattgagcagaggaactccggcgtcagccaccagacgttgcccggcagaatggaccaggcgtgttcgtcgttcaccacctccttcaccgccagcggcagcaggttccaggcggcaaagtaccagaacagcagctggaccagcagcggggtattgcgaaacaacgagacccacgcggccaccagtccgcgccccgcgcgtccgccgccgaggcgcagggccagcagcaggaccgccagcagggtggcgagcaggatcccggcgacgctgacccagacggtggtgagaaaaccagagataatccattgcaacggctgcccgctcaggacgccgtgccagtcaagcatcggcgtcactcgaggctctcctggtgcagcggatccagcaccttctgcagaaaacgccgcgcgcgggcatgctgcggatgggcgaaaaactcagccggcggggcgacttcgaggatgtcgccgccgtcgataaacaccacccggtcggcaatttcgcgggcaaactgcatctcgtgggtcaccaccagcatggtgatcccgctgtgggcgagggttttcatcacctgcagcacttcgccgatcatctccgggtcgagcgccgaggtgggctcatcgaacaggataatctgcggcgaggaggccagggcgcgggcgatggccacccgctgctgctggccgccggagagctgcgccggcatctgctgcgctttttcttccagtccgacctgacgcagcagcgccagcgcccgcgcctgagccgcgcttttcccccagccatgaacgcgctccagcgccagagtgatgttctcctgcgccgtcaggtgggcataaaggttgaactgctggaagacaaagccgacgcggctgcgcagctggcgcaaggcgctgccgctcagccggctggtgggtttgccgtcgatcaggatctcgccgccgcttaaggattcgagctggttgatcaagcggatcagcgtcgattttcccgaaccggaagggccgaggatcgccaccacttcgccgggctcgacctgtaggttgatggcgttaagtacctgatgatcgccgtagcgcttggccacatcacggaacgtaatgctggcgcgctgcagacgtgaaaaatccgcggccggagccgcggagtgggagagtaaacccgagaacatattatttcgcttctatggtaaaggcgcgcggctgcggcgttttggtggcagggccaaaccagacatcgtaaattttcgcggcttcgccggttttctccagtttcaccagctcatcgttgacggctttcagcagggccggttcgcctttcttcacgcccacgccaatctcttctttgctgagcaggtcgggcagaattttaaacttggctttatccggcgcttccgccagcagaccggcgaggatggtgctgtcctgggtgatggcctggacgttgccgttgcgcagggcggtcagggccagcggaatatcgtcataggagaggacgcgagcctgcgggaaacgctggtgcagggcctgttcgccggtggtgcctttcaccgcgccgatgcgcgctttgctgtactcatcgagcttatccggagagccggccggcacgaggaactgctggccggtgacgaaatacggcgttgagaaatcaataacctgggcccgctccggggtgatggtaatgtcggcgacgatcaggtcggctttgccggactgcagcagcggaatacggttggctgggttggtggccaccagctcgagtttgacgccgagcgctttcgccagcgcctgggcaaagtcaacgtcgtagccgacgatatggtgggttttggcgtccacggagccgaacggcgggttggcgtcgaaggtggcgacttttacgacgccggcggctttgatgtcagccagctggtccgcctgtgcctgcgaggcgagcagcagcatacccagcgccagtgcgatttttgtggttttattgcgcatagtttttcccctgaatccctgttttgttttgtggacatcacgctcccacaaattgcccgtcggcggcaaagaagaaaaaattcttatctataaccaaaaagaacttaacaaacctatgggtattctttatgcgccgctggcgttttaccaggacggcaacgactgccgggcggtcccctctccctcagggagagggccagggagagagtgataggaccgggggtaatatgcgccagccaggattgcaaattcggaattaatatttcccgcgcccggccaactgtggttgaaatagacccaggcgattcgcttcccgacagaggagaaaacgaaagtggcattgtggcaacggttaacgggctggctggcttttttgtccaacggtgaagccggacagcaggatacccagcgcgtcatggaggcgatcctgccggtagccagcctctacggcgtggacattggcaacgtggaaacccggtggttccgtcatgataagacatactgagcgacgcaggacgcgagaagcctactggaacgaggtgtgctttgtgtagcaagagactgcctgaggttgcggcctcgcaggaggcgccgccgcagcccaggcagttttgaccatgtctatccccccagatacatccgcttaatttccggattagtcagcatctcccgcgccgcgcctgacaaggtgatccggccattctccaggacatacgcccgatcggcgatcgccagcgcggccgtcgcattctgctccaccagcagcaccgtcatattctcttcgcgcagttgcttaatgatgccgaacagctcgccgacaattttcggcgccagcccgaggctcggttcatccagcatcaataacaccggctcgctcatcagcgcccgggcgatggccagcatctgctgctcgccgccgctcatggtgcccgccatctgatggcgccgctccttgagccgcggaaagagggcgtacatgcgatcgcgcaggcgggcgtagccggcgagattattgtaagcgcccatgcgcaggttctcttcgatggtcaggttggtaaagacgcgccgtccctccggcaccagcgccagcccgcgacgcacgatctggtgggtctggctgcgtgagatatcgtcgttgaggaagctgacgcgcccactggagcgcaccaggttgacgatcccgttcagggtggaggttttaccggcgccattgctgccgatcagggtgacgatttcccggtcatagacgtcgatatcgacgcccttcagaccctggatcacgccgtaaaagaccttcagttcccgggcgttaagcataattggcttctcccagataagcggaaatgacgtccggatgctggatcgcctcggccatcaggccgctgaacagcggcttaccgtactccagaaccatcacccgctcgcacaggcggttgacgaagggcatatcgtgctcgattaacaggacgctgagctgatagtcatggcgcatgcggaagatcagctccgccagatcctcggtctccttcgggttcatcccggcggccggctcatcgagcaggagcagcttcggcgcggtggccagcgcgcgggcgatctccactttgcgctggttgccatagcttaggtttgtggcctgcatatgggcgaagtgggcgatgccgatatcctccaggatggccatcgctttggctttcgccgcccgctcggccggaaagtagcgaccaatatgcagggccgcctccagcagcgagtagcggctggcgcggtcgagcccgaccatcacgttctccagcaccgtcatggagttaaacaggcggatattctggaaggtgcgggcgatcccggcgttcaccacctggttgggcttcagccccttcagcgacgtgcccgccagggtgacgctgccgctggtgggtttatagttggcggtaatgacgttaaacagggtcgttttgcccgcgccgttagggccgataaggccaaagatctccgcctcgtcaacatggaagctgacgttgtcgatggcccgcaggccgccgaactgcatggtgacgtcctgcacctgcaggataacgttattttccgccatagccgccgctccttcttccggtctgccaaatctcttttttccccagcagcccctcgcgggcgaagagcatgatgatcagcaacagcagggagaagaccaccattcgcaggcccgggtacgcgccgagatcgtgaccgaagaactgcagcggctgatcgaggaagcgcagccactcgccgctgccgaccaccagcacggtgccgagcagggcgccggtggtgctgccgagcccgccgaggacgataataatcagcagctggaaggtgagcataaagtcgaacagccccggggaaatggtggtcagcagggaagccagcagaccgccgccgatcccttcgaagaaggcgctggtggcgaaggcgcaggttttaatgcggaaggtgttgacccccatggcgatcgccgcatcttcatcgtcgcgaatagctttcatcatccggccatacttcgaccacaccagctggaggatcatgccggtggccagcagggcgaacagcccgcaccagaacaggagatgcggctgctgcggaatatcgttcagcccgatggcgccgttggtgatttgcgggttgttaatggcgaggatcttgatgataaacccaaagccgagggtgacaatggccaggtagtcgccacgtacccggaagaccggcacggcgaggcacaccgccagcgccgccgcgcacaggccgcttatcagcagggcagggaggaagcccgcgtgcaggctgaggatccacgggctgggggcggccatttcaaacatgtctaccttgctgtcgctggagaggatcagcagggcggtcacgtaggcgcccaccgccacgaagccgttcggctccagcgacagctggccggtcacgccgttgatcaggttgtagctgaccgcgaggatcataaagataaaaatggtgctgatgacacgaacaatgtagtcattgaaaaccacgttgattccggccagcagcgcgatacagatgacaataatgaccaggttgcgcagctgcgccccggcggtcgtcgtcgcgttgagcatcagaaacggctcctttccagacgttcgtcgcccataatgccgaccgggcggaacaagaggaccagaatcaagaacaggaaggcgaaagcgtctttatagccgcccagttcggggaagatcgccacggcgaccacctcggtaaaaccgaggataaagccgcccagcaccgcgccggtgacgctgccgatcccgcccagcacggcggcggcgaaggccttcaggccgataagcacgcccatcaggggatcgatcgtcgggtagctgatggagtagaacacgccgccgagcgccgcgagactactgccgagggcgaagaccagggagatgatccggttggcgtcaatgcccatcaggcgcacggtgttgacgtcaaaggccaccgcgcggatcgccatcccatagcgggtgcggtacagcagccagaggatcgccagcagcagcaggacggtgatcagcggcacaatccacgccacgttggtaatgatgacgctgccgaaggcccgggtctggttgaaaaagtcaggggcggagaagaagcgcgagctgccgccaaacagtacgttaaacaggttttcgagaaaaaagctgacgccgatggcagtgatcagcatggagattttcgaggcctgacgcagcggacgataggcgacccggtcaatcagcataccaaacaggccgcacagcccgagggtcaggaaaacggctaccccgaagggtagcccaaccgaagaaaataaaaacagcgtactaaacgcgccgaccatcatcacgtccgcatgggcgaagttgatcagccgcagcacgccataaaccatcgtataaccgatggcaatcagggcgtacatgcccccaagactcattccattgaccacttgctggagaaaaatggcgccgtccattttgtagcctcgtcacaacttaagggttaaccacggtacgaaacgccagcttgccatctttcacttcgttgatgaccgcgctgcgaatggcgtcgccgttctgtaacgtcagcgtgccggtcaccccctggaaatctttggtggcgcggattttttcatttacgcagacccgatcgtggggatcgctgcactggttcatggcgttgacgatgacgttataggcgtccgccgccattgcgccccaggtatgggtcggctgctggtatttggcttcccaggctttgatgaaggtttcccccgccggggtctgctctttggcgttcggcgagtaataatcggtggtcatatagccgttgaccgcgtctttaccgacatcgaagaagacctgatccgcggccagaccatcgccgcccaccaccggtttgttgagccccagctgtttagactgcacggcaatcagcgccccttcggtgtagtagatcggcatgtaaatcatgtcgacattcttcgccttgacgctcgccagctgggctttaaagtccttgctgccgcccggggcctggacctcgatgggaatggtgccgccgtttttcaggaactgggtgcggaacgctttcgccaggccgacggagtagtcgttgctgctgtcaaacacgatggcggcggttttggctttcagatcgcgggaggccagattggccccgaccaccccctggaagctgtccgagaagcagacccggctgacgtagggatggttgcgggtgacgcggtcgttggtggcggtggaggagaccagcggcgttttgctgtcgtcggcgattttggtcatcgccagggtgttggaggaggtgacttccccgatcacggcatccactttatcgctggagaccaggcgctgcatggcgttggccgcttcgactttgtcgcttttatcatcgataacgataagcttgatggtatcgccattttttaacgttggggtgatggcctgaataatgtccagccctttctgcgacggctggccatagccgctgagggcgccgctcaggggtaataccaccccgattttaatttccgctgcctgcgcgctgctggcgccgaccagcgcggcaaccagcgtggccattaaagacgctttcccggaaaacgatttcatgggtatttctccgtcggtcgattatttatctttaaccatcaatgactgcataacattgaggaataatgcgccagcgtatccggcgaattattggctgttatgttgaatagataacgagatatataccctaattaattcgagtcgcatgaaggcggcaagtaagcgagtccccagacgcttacagaagtaagtgactggggagagaacgcagccaacgcacatgcaacttgaagtatgacgggtatttttaatgcgctgatttaccttacaacgtccgtttcgtttttactcatgcaatattcttattacctgcagggaagggcataaggctggcgacaacacggtttttggtacggtgaaagcattttgccggggggcgactggcgccttacccggcctgaaaaatacgccatataaaccgctggcacggcttccatagacccgtgccagcgaagcgccgccgggcaatttcagcacgcggcggaatataaagtcatgtgcccaagataatattaaaaatctattctgctgctcgcgtgacttattattttaaagggggcaacggttttattttaccatgcagcgccggattatcgctttcatctttcaggcccaccccggtaagccggcgcaaaaaagcctgctccagcagccaggccagtttaaaggcggcggcgtcatggcttaatccctccggccgaatattggagatacagttgcgctcagactccaggcgctgacgatgaggctgccaggtgaggtagacgccgaggctgtccggcgaggagagacccggtcgttcgccaatcaggatcgccaccgcgcgggctttcagggtttcgccaatatcatcccccagcgccacccgcgactgatgcgccagcaccaccggcgccaggccgatacccagcgtccgcagatagggcagcagggcgcggatcaacggcaccgcctggcgctctaccgcccaggaagagaggccgtcgccgatcaccagcagcaggtcggcggggcggacgccgctggcggcgaggtcggcgcgactctcatcggcgagctgccgcccgagatccgggcgccgcagataggtatgacggtccggcgcggcgctgtgcaccgtcagggcctcgaggccgagcgccgccagcggcgccaccaattgttggctggcgaacggctgatgaatggcatcccgcgctctggcatgggccagaccaaagttgaggacttcgcgggtcggcagactggcgccgctgcgccccagggcgatccgcgcatcggtaaattcacgcagcgggttccaggcatcgggacggttcatacggaggctccttgcggcaggacggacagcagcggatggcgggcgtcggtgagccgcagcgcgccgtgcggatcgataatttgcattttcgccagccagtcggcgaactccggggcatgctttaagcccagcaggcgacgggcgtacagcgcgtcatggaacgaggtgctctggtaattgagcatgatatcgtccgctccgggcacaccgatcaggaaggtgagcccggcggcgcacagcaaggtcagcagggtgtccatatcatcctgatccgcttccgcgtggttggtatagcagacgtcgcagccgatcggcaggcccatcagcttgccgcaaaaatgatcctccagcccggcgcgaataatctgcttgccgtcgtagagatactccggaccgataaagccgaccacggtattgaccagtagcggttcaaagtggcgggcgacggcgtaggcccgcgcctcacaggtttgctgatcgacgccgtggtgggcgttggccgacaggcagcttccctggccggtctcaaaatacatcacattgttgccgagggtaccgcgcctgaggctcagggccgcctcgcgggcctcctgcagcatggcaaggttgatgccgaagccgctgttggccgcttcggtaccggccaccgactggaacaccagatccaccggcgcgccgcgctcaatcagctgcagcgtattggtcacatgggtcagaatgcaggactgggtagggatggcgaagcgctgaataatatcgtccagcatgacgttcagctgcgccagcaccggtaagctgtcgctggccgggttgatgccgatcaccgcgtccccggcgccgtacagcagcccgtcgagcatactggcggcgatgcctttcaggtcgtcggtgggatggttgggctgcaggcgtacgctgaggtggccgggcaggccgatggtgttgcgaaagcgcgtcaccacctggcatttgctggcggcaaggatcagatcctgattgcgcatcagcttactgaccgccgccgccatctccggggtgatggcgcgggcgacccgctgcagcgtggcggtatcggtagcatcatccagcagccagtcgcgaaaatcgccgaccgtcaggtgacgcagggcggcaaagccctgcgcatcatgggtgtcgaggatcaggcgagtcacttcgtcctgctcgtaagggataagcgggttgtcgagaatgtcggtcagcggcacctcggcgagggccattttcgccgccatccgctcttcggctgaggtggcgataatccctgcgagggcgtcgccggagcgggccggcgacgctttcgccatcagcgttttcagactatcaaagcgccatacctggcccgatagcgtggttttatacatgccgcctcctcaggagaccgtgcgcagttgaggatccactggcgcccgttcacgggccgctgcggttttgcggaaccacaggtagccgccgagcatcatcgccgcgaaaatcagcgccaacagcaggttataccagaccatcgccaccaggcagagcaccgccatgccgagggcaaaggccggcgccagcgggtagagcggggcgcggaacggacgaatcagcttcggctcgctacggcgcagtttgaacagcgccgccatggaagtgatatacataacaatagccccaaataccgacatggtgacgatgcaggcggtcagcggcatgccgctgatggtgatcagcgagtcggagaagatcgcggcgatccccaccacgcccccggcaaggatcgccagatgcggggtgcgggtgcggcggttgagggaggccagcccggcgggcagatagccggcgcgggcgagggagtagatctgccgcgagtagcccataatgatgccgtggaaggaggcgacgaggccaaacagccccagccacaccagcatatgcagccagccgctgccgttgcccacgaccgtcttcatcgcctggggcagcggatcgttaatattggacagcgcgcgccagtcgccgacgccgccggcgaagaccatcacgccgatcgccagcaccgtcagcgtcagaatgccgccgcccagggcgcggggaatggtgcgctgcggatctttggcctcttcggccgccatggaggccccctcaatggcgaggaagaaccagatggcgaacggaatggcggcgaacatccccggcagcgccaggccgctgaagctgtccgcgcccgcccagccgttagtggtgaagtggctccaggagaagccgggggcgaccacgcccatgaacaccagcaactcgaagatggccagcagggtgacgatcagctcgaaggtggcggcgatgccgacgccgagaatattgagcgtcataaagatcacgtaggcgccgcaggcgacccatttcggatccagcgccggaaactgcacgttgaggtaggccccgatggccatggcgatggccggcggggcgaagacgaattcaatcagggtggcaaaaccagcgataaagccgccggtgggcccgaaggcgcggtaggcataggcgaaagggccgccagcgtgcgggatggcggtggtcagctcggtaaagctgaaaataaaggcgcagtacatggcggcgaccgccagggcgacgaccataaaccccatcgtgcccgcctgcgaccagccgtagctccagccgaagtactccccggatatcaccagtccgacggcgatcccccataaacgaaaactgccgagcgttctttttaaggtggtggtgtgctctgtcatacgtattgcctcgccagatagaaaggtgctgaacgacaggctgcaaagagagtgccagaacgttgtctgccgcgataaggcgtcagtccgtggcgcgcccgctggcgctgcgcaaaaatggggcaggctgcacgctgtcggcgcgcgccctggtgcagcggctttgctttttcagcggcggcacggtataacacttcttcttttggatgtttagatgtctatacgtttatacgcagcatgacccgggcaagcgggctggcgtgagaaaataaaatgcaaagcacaacacaacaacaaggtgggcagctgaagcgcaccatgaaaacgcgccatctgatcatgctgtcgctcggcggcgtgattggcaccggcttattctttaataccggctatatcatctccaccaccggcgcggccgggacgctgctggcgtatctgattggcgccctggtggtctggctggtgatgcagtgccttggcgaactgtcggtggcgatgccagagaccggcgccttccacgtttacgcggcgcgctatcttggcccggcgacgggctataccgtggcgtggctctactggctaacgtggacggtggcgctggggtcgagcttcaccgcggcgggattctgcatgcagtactggttcccgcaggtgccggtctggatctggtgcgtggtgttctgcgcagtgatcttcggccttaacatcatttcgacgcgcttcttcgccgaaggcgagttctggttctcgctggtgaaagtgatcaccatcgtcgcgtttattattctcggcggcgcggccattttcggcatcattccgatgcaggatggctccccggcgccgggcctgcgcaatatcaccgccgaaggctggttcccgcacggcggcctgccgatcctgatgaccatggtggcggtgaacttcgccttctccgggacggagcttatcggcattgccgccggagagacggaaaacccgcataaggttattccggttgccatccgcaccaccatcgcccggctgattattttctttatcggcaccgtgtttgtgctggcggcgctgatcccgatgcagcaggcgggagtggagaaaagccccttcgtgctggtgtttgagaaggtgggcatcccttatgcggcggacatgttcaacttcgtgatcctgacggcgatcctgtcggcggctaactccggcctgtacgcttccgggcggatgctgtggtcgctgtcgaacgagaagacgctgccggcctgctttgccaaagtcaataaacggggcgtgccggtgaccgccctgtcggtgagtatgctgggcggcgtgctggcgctgttctccagcgtggtggcgccagatacggtgtttgtcgcgctgtcggcgatctccggttttgcggtggtggcggtgtggttgagcatctgcgcctcgcactttatgttccgccgccgccatctgcagcagggtaaggcgctgagcgatctccagtatcgcgctccctggtatccggtggtgcccgttctgggctttgtgctgtgcctggtggcctgcgtgggcctcgcttttgacccgagccagagaattgcgctgtggtgcgggatcccctttgtggccctgtgctatggtgcctggtatcttactcgttcacggaatatgactcaggagccccaacatgtcgcagactaatccgtttaccgccctgcttgacgcccagcctttcgtgctgctggacggcgccatggccaccgagctggaggcccgcggctgcgatctggccgacagcctgtggtcggcgaaagtgctgctggagaacccgcagctgatccgcgatgtgcatcttgactactttcgcgccggggcgcaggtggcgatcaccgccagctatcaggccactccggcgggctttgctgcgcgcgggctggatgaggcgcagtcccgggcgctaatcggcaaaagcgtcgagctggcgcgcaaagcgcgcgaggcgtacctcgccgagaacccgcaggccggtacgctgctggtggccggttcggtggggccgtatggcgcgtttctcgccgacggctcggagtatcgcggcgattatcagcgcagcgcggcagagttccaggccttccaccgcccgcgcgtcgaagcgctgctggatgccggcgccgacctgctggcctgtgaaaccctgccgtcattcgctgagatccaggccctggcggccctgctgcaggagtatccccgcgctcgcgcctggtactccttcacgctgcgcgacgccgaacatctcagcgacggcacgccgctgcgcgaggtgatggccgccctggcggataacccgcaggtggtggcggtggggatcaactgtatcgcgctggaaaatacgcccgcggcgctggcgcatttgcacagcctgacggccctgccgctggtggtctatcctaactccggcgaacattatgatgcggtgagcaagacctggcaccatcatggcgaagcctgcgccagcctggcggattatctgccgcagtggctggcggccggggcgaagctgatcggcggctgctgccgcaccacgccgaaggacatcgccgcgcttaacgcgaagcgctaagttttttgccgggtggcgctgcgcttacccggcctacatattgcgcgaaacggatgctgggtaaggcgtagccgccacccggcgccaaccatctgccactaactcaccgcacaaaaccaactatcctttcccgcttttgttctaaaaacgattcgctattagccagaatttttaattacttcatctccatcctgatgccggaaatactgcacctataacaactcaggggaagcagacattatggcattcacatcgcgaattactcttctggcggcgctggctgttgccgccttccaggcgcaggcggtcaacgttaccgtggcgtatcaaacctccgctgagccggcgaaagtcgcccaggcggacaacaccttcgccaaaaccagcggggcgaccgtcgactggcggaaatttgacagcggcgccagcgtggtacgcgccctggcctccggcgatgtgcagatcggtaatattggctccagcccgttggcggtggccgccagccagcaggtgccgattgaagtgttcctgcttgcctcaaagctcggcaactccgaagcgctggtggtgaagaaaagcattaccaaaccggaagatctgatcggcaaacgcatcgccgtgccgtttatctccaccacccactacagcctgctgtcggcgctcaaacactggggcatcaagccgggccaggtacagattattaacctgcagccgccggcgattatcgccgcctggcagcgcggggatatcgatggcgcttacgtctgggcgccagcggttaacgaactggaaaaagagggcaaggtgctgaccgattcttctcaggttggggagtggggcgcgccgacccttgacgtctgggtggtccgtaaggacttcgccgagcagcatccggagatcgtcaaagcgtttgctaaaagcgccatcgacgcccagcagccctacatcgccaacccggaggcatggctaaaacagccggacaacatcagcaagctggcgcgcctgagcggcgtgccggaagccgatgtccccgggctggtgaagggcaatacctatctcaccgccgctgagcaggcgcaggcgctgaacgggccggtcaatcaggccatcgtcgataccgcgcgcttcctgaaagagcagggcaaagtgcctgcggcgggaaccgattatcgtcagtacgttactgaccgctttgtgaagtaaaggaggcggcgatgctgcaaatctcgcatctttccgccgactacggcggtaaaccagcgctggcggatatcaacctgacgctggagagtggggagctgttggtggtgctggggccttcgggctgcggtaaaactaccctgctgaacctgattgccggattcgtgccctatcagcacggcagcatcaccctcgaaggtcagcgggtgaccgggccgggcgcagagcgcggggtggtcttccagaatgaaggtctgctgccgtggcgcaatgtgcaggataacgtggcgctaggcctccagctggcgggcgtggataaagcgcagcgccggcaagcggcggcgcagatgctgaagaaggtggggctcgaaggggcggaaaagcgctttatctggcaactgtccggcggtcaacgccagcgggtgggcatcgcccgggcgctggcggcgaatccgcagctgttgctgctggatgagcccttcggcgcgcttgacgcctttacccgcgagcagatgcagacgctgctgctgaaattgtggcatgagaccggcaaacaggtgctgctgatcacccatgatattgaagaggccatttttatggcgaccgagctggtgctgctgtcgccggggccgggacgggtggtggagaggctgcgacttgatttcagccgtcgctttgtcgcgggcgaatcctgccgcagcatcaaatccgacccgcgctttattgaacagcgggaatacattctgagccgggtgtttgaccaacgggaggctttctcatgagcgtggtactgaacgacaaaccgcgtcagtcgacgctgaagtggcgctggccgctctcccgccagctcaccctcagcgtggcgaccctggcggtattgctggccgtctggtgggcggtcgcggcgttgcagctgattagtccgctgtttctgccgccgccgggccaggtgctgcagaagcttatcaccatcgccgggccgcagggctttatggatgcgacgctctggcagcacctggcggcgagcctgacgcggatcgttatcgccctgctggcggcagtgcttattggcgtaccggtggggatcgccatggggctcaactcgacggtgcgcgggatcctcgacccgctgatcgaactctatcgtccggtgccgccgctggcctacctaccgctgatggtgatctggtttggcatcggtgaaacctcgaagatcctgctgatctacctggcgattttcgcgccggtagccatgtcggcgctggcaggggtaaaaagcgcgcagcaggtgcggattcgcgctgcccgttcgcttggcgccagccgggcgcaggtgctgtggctggtgatcctgcccggcgcgctgccggagatcctcaccggactgcgcattggtctcggggtgggctggtcaacgctggtggccgctgagctgatcgccgccacccgcggattaggatttatggtgcagtctgccggcgagtttctcgccaccgatgtggtgctggcggggatcgcggtgattgccattatcgcctttttactggaactgggtctgcgcgcgctgcagcggcgcctgacgccctggcatggagaagtacaatgagtgaacgtctgagcattaccccgctggggccctatattggcgcgcaggtgagcggggcggatttaacccgtccgctgagcgacaaccagtttgaacagctgtatcacgcggtgctgcgtcatcaggtggtattcctgcgcgagcagaacatcaccccggcgcaacagcgcgatctggcgctgcgttttggcgacctgcatatccatccggtctaccctcacgcccctggcgtggaggagattatcgtcctcgatacccacaacgataatccgccggataatgacaactggcataccgatgtcacctttatcgacacgccgcccgccggcgccattctggcggcgaaagagctgccgacgaccggcggggacaccctgtggaccagcggcatcgccgcctgggaagcgctgtcagaacctttccggcagctgctgagcggcctgcatgccgaacacgatttccgcaaatcgttccaggagtataagtacaacaagaccgaagccgagcatcggcgctggcaggaagcggtggcgaagcatccgccgctgctgcatccggtagtacgtacccacccggtgaccggcaagcaggcgctgttcgttaatgaaggctttaccacgcgaattgtcgaggtgagtgagaaagagagcgcagcgctgctgaacttcctgtttgctcatgtcactaaaccggagtttcaggtgcgctggcgctggcagccgaacgatgtcgctatctgggataaccgggtgacgcagcattacgccaatgccgactatctgccgcagcggcggatcatgcaccgggcgacgatcctcggcgataagccgtattaccgggcggggtaaggcttgtagccggttaaggcatcagccgcgagccgcggagaacattgcccgcagcttcccggaggcgtcgcctgacgcgccttttccgggctaccgaaccgtcggaaacggtagcccggctaaggcgcaacgcgccgcaagccgggaaaaagcgtttatgccgatttttgcgcacccagatgcgcgccaatatagcgctgatagcggttcgctttcagataggtcaaatccaccagcaccagaccatccacgcagttattgaaatccggatcgctgccgaaatcgataaactgcacgccgcccggctcgcacacttccgagtactgcttatacagcggggggatcgcgcagccgagattgccgagcagggacttcagccgggccaggtcgtcgttgtaatcctccccgccaaactgcgccagcacgtcgggcagcgacgccggataagggcgacgcgactccgccagcggatgcgtcgccgggaaccacagccggtagaacgccaccagcagatcgcgggcggcgggcggcaatccgccagaaatcgacaccggaccaaacagatagcgatagtgcggatagcgcgccagataagcgccgatgccggaccacaggtagtccagcccgcgacgcccccagtagcgcggctggataaagctgcgccccagctcaatgccgtgctgcaggacatcgtccatccgcccgtcgtaatggaacagactgtaactgtagatcccctccaggccgcgctttgccagctggatggtcgtcggcataaagcggtaagcgccgacgatctcgaggtcttcttcatcccacaggatcagatgtagatagtcgtcgtcatacccgtcgatatcccgccgtttgccgctgccttccccgaccgcgcggaaggcgatttcccgcagacgtcccagctcgcgcagcagcggcgcgtcctcctggccgttgcgctgccagaggtaaatcactttgccatcggcggtgcggcccaggcattcggccttgtgcagttcgcgtttgagcagcgcccggtcttccggacgggcgatggcgctttcggttttaaaccgccccggcagccctttgcgcagctgttcaaggtgctgatagcagcggccggtaagctcgcgagcgctggactgcgcatcgaaccagttcgaccaggggatctgctggccgatacgcaccggcaggctgctgttgcgccggcgaaacatctgctgcatcagcaggagcagcggcaggttgtcggagaccagcgtactggcgtaaaacagggcgctgttgcgggcgttaatccacgccggcagcagcggggcacggtattttgccgccagcttaataaagccggagtgccattttttatcgcggatgccgcgacgggtgaggcgggagacttcccccgccgggaagaagatcagcaccccgccggcctgcagctgctggtccatctgctgcagcgccgctttagcggtgcggccatgaatattatctaccgggataaacagcgagctcaggggctcaaggtgggtgagcatgcggttggtgaccactttgacatcgcggcgcacgcgggataccgcatacaggagcgccaggccgtcgagggtgccggtggggtggttggcgataatgaccagcgggccatattcggggatttgttcgagatcgtgcgccgggatggcgcagcggatattgaggtattccagcacctgttcgaccgtatcaagccccttcaggtggcggtgacggtcggcaaattgttgaaactcttcctcataaaatagcttttttaacagtttcttttgccagggggcgggcctcgcctgaggccacaggtcatcgagtacgttgtcgagactaaacatagtggctcctcctccgtcctgcccagacagtagaaggtggagatgtcgttcagattacagttgggtgaagtttcggtcgcagcgggggagacgacgggtagggagccgtttttgtgccgggtggcggctgcgcctgacccggcctacatgcgggatggggctgcgggccccggtaagcgcagcgccaccggggaggggcgggtttaacggaggatctttttctcggccagatcgagggcgaaatagctgaagatcaggtcggcgcctgcgcgtttgatagcgccgaggctttccagaaccactttctcttcatcgatagcgcccgcctgggcagcgaatttgatcatcgcgtactcaccgctgacctgataggcgccgagcggcagatcgctgcgttcgcggatatcgcgcagaatatccaggtaggcgccagccggtttcaccatcaggcagtcggcgccctgggcttcatcgagcagcgactcgcgaatggcctcccggcgattcatcgggctcatctgataggttttccgatcgcccttcagcgcggtaccggccgcttcgcggaacggaccgtagaaggaagaagcgaacttggtcgagtaggacatgatcgccgtattggtgaagccggcggcgtccagcgagcggcgaatcgcctgcacctgaccgtccatcgcggcggaaggagcgatgaaatccgcccccgcggcggcggcgacaacggcctgtttgccgaggttttccagggtcgcgtcgttatccaccccgtggtcgcacagcacgccgcagtggccgtgggaggtatattcgcagaagcaggtatcggacatgacgatcatctccggcaccgtggacttacaaatccgcgacatacgcgccaccagaccattttcattccaggtatcgctgccggtggcatcggtgtgatgagaaataccaaaggtcatcaccgagcggatcccggcgttggcgatgcgttcgatctcgcgcgccagatatttttccggaatgcgcatcacgccgggcatggcctctatcgctttgtaatcatcaatttcttcttcaacaaagatcggcaacaccaggtcgttcaaactcagtgttgtctcttcaaacagggcgcgcagcgcagcggattgacgcaggcggcgggggcgagtgattaaatctgtcatggtttgcctgattttgtgaaatgaaagacgatagtgtaactgaaatggcagcgggatgtttcgccaaaacgatcgttatggcgcatcggcgaaaccttccccgggcttactggctggccgtctgcatgttgggctgtgcgccgctcaactcgctgaccaggtcgttgatgccatcgctcatattgttgaagcgggttaacggcgagcgggttaccaccacaaaggcgccaacgttagcctgcggattcatcgccatataggtgataaacccgccgccgccgccggttttctgaataatccccggatggccgttcttcggcttcatatacacccagccgaggcccagcgcgtctgcgcggcccggcacgtccataccaatcacccgggtcagctggttacgctgataaatcagcgtctgcatccggtcggcctgctggctgcgggtatagaaatcggatgacaggaactgctgcatccagcgcatcatatcccccggcgtcgagtagactccgccgctgccgatcgccgccagggtgttgttgcacgggctggcgcctttttccgggatcatcagccgctggcactgatccggtgacggggtaaaggtggtgtccttcatccccagcggccgggtgatctgctcttcaaacagctgcggatacggtttgccggcggcggtggagagcgcgtccgccagtaaatcgaaggccagattggagtaggcggcctgcgagcccggcgcggtcttcagggtcgcggtagagagccagttccagcgctgctggcgggtcggccagacaaaaaccggacgatgagcggcgccgccaggctgctcgcgcggcagggcgctggtatgggtcgcgaggttaaccagggtgattggttttccctgccagtcaggcacccgggcgcccggcggggcgtatttactcagcggatcgttgagtttcaccaccccctggtcgagcagcttcaccagcatctcgctggtcatcagtttgctgagggaggcgatacggatcaccgagtcgagctgcgggtgctgattattccccgggcgggtttcgccaaagctgcgaaaaacacgctgattgccatcgataaccaccagcgccatgccggtggcgccgctgccatagtagatatgattggcgtaacgatcgaccacatccgaggcgaaaaccgggtcaacggtaggctgtgcggcctgcaccgaggtccacgacgccgcgcacagcgcagcaaaaatgagcaaactacgtttcaacggagatcatccattaaataaataaaaaagaagagggtatttatactacgaagtggcgcagaacaaagcgggattcacgacattcctgcaggaaaaaggtaacggtgcgtaaaaaagacttttttacgctttcggataccggcttttttcgccggcgcgtatgatgaccgtttggctgaaggttcgtgggagagaacaatgacggctcaacgggtagtgatggtcgtggatatgcaaaacggcgtgttcgccacgccgcgtctggcgcgcgagcgctgcgtcgcgcaaattaatcgtctggtacgcgcggcggacaaggttattttcattcagcatgatgaagccggcggcctcgaagccggcagcgaaggcttcgcactgcttcctgagctggagcagccggctggcgcgctgtatgtcaccaaaaccgcctgcgatgccttctatcacacctcgctggcgcaggtgctggacgaacacgacattcagcagttcgtcatctgcggctgcgccaccgactactgcctcgataccaccattaaaaatggcgccagccgcgggtacggtattgttattgcggaagatgcccacaccaccgccgaccgccccgccgcgcaggccgcgacgcttatcgcccactacaatgaggtgtggcgtacgctgaccattcctggcaatcctttacaggtgaaacccacagaaacaattctgcacgcatggcagcagaactaagctgttgatatccggtcttatcattcgtctgtcccgcgagggctcatccgcgcggcggccgacgtatgcgtcgtacacagcaatagcagaacgataagaagttagcaggagacaatgatgtttaaatcttttttccccaaaccggggccgttttttatttctgcctttatctggtcgctgctggccgtgatcttttggcaggcgggcggcggcgactggctgctgcgggtcaccggggcatcgcaaaatgtggcgatcagcgcggcgcgcttctggtcgctcaactatctggtgttctacgcttactatctgttttgcgtcggcgtgttcgcgctgttctggtttgtctactgcccgcaccgctggcagtactggtcgattctcggcacctcgctcatcatcttcgtcacctggtttctggtggaagtcggggtggcgatcaacgcctggtatgcgccgttctacgacctgatccagagcgcgctggccaccccgcataaggtcagcatcaaccagttttatcaggaaatcggcgtctttctcggcatcgcgatcatcgcggtgattattggcgtgatgaacaacttcttcgtcagccactacgtcttccgctggcgcacggcgatgaacgagcactatatggcccactggcagcatctgcgccatatcgaaggcgccgcgcagcgtgtgcaggaagataccatgcgttttgcttccaccctcgaagatatgggcgtgagctttatcaacgcggtgatgaccctgatcgccttcctgccggtgctggtgacgctctccgaacatgttcccgacctgcctatcgtcggccatctgccgtatggcctggtgattgccgctatcgtctggtcgctgatgggtaccggcctgctggcggtggtggggattaagctgccgggcctggagtttaaaaaccagcgcgtggaagcggcctatcgtaaagagctggtttacggcgaggacgatgaaactcgcgccacgccgccgacggtgcgcgagctattccgcgcggtgcgtcgcaactatttccgtctctatttccactatatgtatttcaatatcgcccgcatcctctatctgcaggtggataacgttttcggccttttcctgctgtttccgtcgatcgttgccggtacgattaccctcgggctgatgacgcaaattaccaacgtcttcggccaggtgcgcggctcgttccagtacctgatcagctcgtggacaacgctggtggaactgatgtccatctacaaacgtctgcgcagttttgaacgcgagctggacggcaaaccgctgcaggaagcgatcccgacattacgttaatcaagacaaggaagcataatggccgcacgtttatcgcgcattattcccgtttcattgacgctgctggcggccatggcgctgagcgcctgtaccagccagcaggctccggcgctgaaagagggcgagaagcctgttgacgtggcgtcggtggtgcggcagaaaatgccggccagcgtcaaggatcgggaggcctgggcgcaagccatcgccaccgcgtttgacagccagaagctggcgccgacggaagaaaacgtctgctcggtgctggcggtcgcgcagcaagagtctaactatcagtccgatccggtggtgccggggctgaataaaatcgcctggcaggaaattgaccgccgggcggaaaaaatgcacattccgccgtttctggtccataccgcgctgaagatcacctcgccaaacggtaaaagctatagcgaccgtctggacaatgtgaagacggaaaagcagttgagcgccatttttgatgactttatcgggatggtgccgatggggcagaagctgttcggttcccttaacccggtgcacaccggggggccgatgcaggtcagcattgcttttgccgagcagcacacctccggctacccgtggaaaatgaacggcacggtgcgccaggaggtcttcagtctgcgcggtggcctgtggtttggcacctatcatctgctgaactatccggccagttatagtgcgccattgtaccgctttgccgacttcaacgccggctggtacgccagccgtaacgccgccttccagaacgcggtggtgaaagccagcggggtaaaactggcgctcgacggcgaccttatccgctacgacagcgaggagccgggcagcaccgagctggcggtgcgtcgcctggcgagccagctggggatgagcgacagcgagatccatcgtcagttgaaaaagggcgacagcctggcgtttgagaagaccgatctctatcagcaggttttccgtctcgccgagaaaaagacgggcaaaaccctgccgcgggagatgttgccagggatccagctggagagtccaaaaatcacccgaaatctgacgacggcgtggtttgcgaaacgggttgatgagcggcgggcaaactgtatggcgcggcgttaacggcgctgacgccagcgcacgataagcgccagtaccccgatgaacgtgcagccgatcaggaaagggatcagaccaaagagggtacccacggcgaggctgatgtcgacttgcggacggctggcgtcctgggcttgcatcaggcgttcaaatacccccggggcgtggatcagcatgctgagcatctgcgcgccggcccagcagcagatcaacacgaacagcccgtaggcgacatggctgccggtcagcgcccccctttttttatttcccaaaagcgattttgaaaaactgaattcagccataggccctcccacatctgcgctgctggttttttctccagctctatgtcaggtattctggcagtcaggggccatcatcagtatcagattgctggtaattgccgtccaggaataatcctgttttcgccgttgtgttaaccgcgccacaggagcacaaaagggagagcggcgtcgcaatccagcaacattctccatatcgctacagaccgccgcgggcggctatgcgaagatgcgttttttgctgttggaggccgcatgaagctcactgataaaattcgccgcgattggcactactacgccgtggcgctggggttgatttttattcttaatggcgtggtggggctgctggggtttgaaactcaggggtggcaatcctacgccgtcggtctgatcacctgggtcattagcttctggattgcgggctttgtgatccgccgccgcccggcagaagaggcctgaggccgccgctgccaggcggggtaaaatgcgttttagttcatggaggttttcagcgcccggtccgcggcatggcgctccaacgccagctcaatcaggcgggtgatcaggctggtgtagtcgagaccgctggcctgccacagcttcggatacatgctgatgttggtaaagcccggcagggtgttgatctcgttgatcaccacctcgttgtcggcggtgaggaacacgtcgacacgagccatgccgctgcagcccagggtctggtaggcctgcaccgcgatagcgcgaattttgtcgttgatctcaggggcgatagcggccgggactaccacctgcgcgccctgatcgtcgatatacttggtgtcgtaggcgtaaaactcgctgttgaggacgatttcaccgcaggtgctggcctgcgggtggtcgttacccagcaccgcacactcaatttcccgccctttaatgccttgctccaccaccactttatggtcaaattcgaaggccagggccaccgcctgatggtactgctcttcgtttttaactttgctgacgccaaccgacgagccctgattagccggcttaacgaacagcggcaggccaagcttcgcttcgacatcggcaaagctgaactgcgcgcggttggcgcgggtgagtgtgataaacggggcgacggcgagcccggcgtcgcgcagcagacgtttggtcacgtctttgtccatacaggccgcagagcccagcacatcggagccgacgaacggcagattcgccatgcgcagcatcccctgcagggagccatcttcacccagcgtgccgtggacgatcgggaaaatcacatcgatggccgccagcggttggccgctttcggcgttaatcagctgctgcgcttcgcggcccgggatctgcgccagagtcaccgtggaagggcgcagggcaatgcgggcaggatcctgtgcgttgagcaggtagttgccggcgtcgttgatatgccacagcccctgtttatcaatacccaacagaaccacatcgaagcgcgatttatcaatcgcttccacgatattcttcgctgactgcagcgacacttcatgctccgccgacttgccgccaaaaacgatcccaaccctcatctttgccatttcaacttccatccagataacatcaaagggcataacataccatgtgaaaccgctgcctggctgccataatatttacctgatcaattgacgggagtgggcgtgagaggaaagacgctgctggtgctggccgggctgctcggcgcgggcctgttgggataccgcaatctgccgccgcacctgaatccgctggcgccgctggcgctggacgatcccccgggctggctgacgtcgtttaagctgcgcaggctgacggcagaccagtgcgcctccttgctggcggaagccaatcgccggcggcttatcgccagccggccggtggccgacagcgagggaagctgccctctgcgtaacgtggtgcgggtggcgaattttggctcggtgcagctgagcagtagttttctcgccagctgcccgctggcgctgagcagtgcgctgtacatcgagcagcaggcgaagccgctgacccggcagctgatggcgagcgatctgcgtcagatcgatcatctcggcagctttgcctgccgcaatatttaccatcgtcaacaggcgcggcgcagtgaacacgccacggcggacgcgctggacgtcagcggtttccgtctggcggacggtagacgcgttagcgtcctgcagggctggcggagcgagacttcgcgcccctggctggcggcgctgttgagcagcagttgccattacttcggtaacgcgctggggccagagtacaacgcggctcacgccaaccattttcatttcggcatgcgcgggcagggcttctgcttttgagcataaagcgctatgagcagcctaaatgaccagaaaatgcttcgtcaggctctcatccgcagccataaaacaccaaactcaccgccagcgcatctatggtagtacaccagtgggatgaaattgctaagctagataataattggcaaatcattaatgaatacgcgtagttatggaatcctggaaggttaatctcatctccgtctggtttggttgcttttttaccggcctggcgatcagtcaaattctcccctttttacccctctacgtctcccagctcggcgtcacctcgcatgaagcgctatcgatgtggtcggggctgaccttcagcgtcacttttcttgtctcggcgatcgtctcgccaatgtggggaagcctggcggaccgtaaaggccgcaagctcatgctgctgcgcgcctcgttggggatggcgattgccattttactgcaggctttcgccaccaacgtctggcagctgtttatcctgcgggcgatcatgggcttaacctccggttatattcccaacgccatggcgctggtggcctcccaggtgccgcgcgagcgcagcggctgggcgctaagcacgctgtcaacggcgcaaattagcggggtgatcggcggtccgctgctgggcggtttcctggcggaccacgtcgggctgcggatggtcttttttattacggcgatcctgctgaccatcagttttctggtgaccctgtttctgattaaagagggcgttcgcccgcaggtcagcaaaagcgagcgtctcaccgggaaacaagtctttgcctctttgccctatccggggctggtgatcagcctgttcttcaccaccctggtgatccaattgtgcaacggctcaatcggcccgattctggcgctgtttattaagtcgatggcgccggacagcaacaatatcgcttttctggccgggatgatcgccgcggtgcccggcgtgtcggcactgatttctgcgccacggttgggtaagcttggcgaccgcatcggcacctcgcggatcctgctggcgacgctctgctgcgcggtggtgatgttcttcgccatgtcctttgtcaccaccccgctgcaattgggtacgctgcgttttctactcggctttgccgatggcgcgatgctcccggcggtgcagaccttattgctgaagtacagcagcgacagcgtcaccgggcgtatctttggctataaccagtcgtttatgtatctgggcaacgtcgccgggccgctaattggcgcctctgtgtcagccatggccggcttccgctgggtgtttattgccaccgccattatcgttttcattaacctctggcaactggcgtggatgctgcgccaaacccgccgggctaacgcctgaacctctgctgacggtatttattgcgataccgtcagcattattcgccgtcagcggatttactattactttttgttatcgtcatggcgtgaacgctattccattttattattttccaggcaatctggttataagtaaccccggtcatgattaaacaatactatttatagtggtattttattgtggtaaaacgtttcgctgtatattgggtgttgcgatgattcttaatttaagtaattctgagatccgtcatcgcgtatgacatcccaatcaaaacaggcctcgcataaggaactggtgctatgaagaatctcattgctgagttactggttaaactggcgcaaaaggaagaagaagcaaaggaactgacggtgcaggttgaagcgctggagatcgtggtcaccgcattattgcgccatatggagcatgatgcccagcaggcattgattcaggatattgaacaggcgattgaccaggtgacgccctgtccgccggtcaacgaccatgatgcgatgctgctgcagcaatatctaaagaagctgttgcggcatcctcgtagctagtctttgtgacacgacaaggatgccgtcatttttctgtcatctcccttttataaagtctccctcgttttgtttttttaagtattttttacatggagatgacaaaagtgaaattaagcgccctgtttattgccctgattcctctactgggctcgccggttattcatgcagaaactactgctgcgccggttctggaaaatcgcgctgcgcagggagatatcaccactcctggcggcgcgcgtcgtttaacaggcgatcaaaccgaagcgctgcgcgcctcgttaatcaataagccagctaaaaacgttattttgctgattggcgatggcatgggtgattcggaaattaccgctgcgcgaaactatgccgagggggcgggcggtttctttaaaggaattgatgctctgccgttaaccgggcagtacacgcattattcgctggataaaaaaaccgggaaaccggactacgtgaccgactcggcggcctccgccaccgcctggaccaccggcgtgaagacttataacggcgcgctgggcgtcgatattcatgagaatgcgcatcagaccatcctcgagctggcgaaagcggcggggctggccaccggcaacgtttccaccgccgagctgcaggacgccacccccgcggcgttggtagcgcatgtgacatcgcgtaaatgctatggcccgacggtcaccagcgaaaaatgccccagcaatgcgctggaaaaagggggcaaaggctccattaccgaacagctgctgaacgcccgaccggatgtcaccctgggcggcggggcgaagacctttgccgaaacggcgacggcgggcgagtggcagggcaaaaccctgcgcgagcaggcgcaagcgcgcggctaccagattgtgtccgacgcggcttctcttgccgccgcgacggaagccagtcaggataaaccgctgctgggactctttgccgatggcaatatgccggtacgctgggaagggccgaaggcgtcttatcacggtaatatcgataagccgccggtgacctgtacgccaaacccgaagcgtgacgcctcggtgccgacgctggcgcagatgaccgagaaagcgattgacctgctgagtcgcaacgagaaaggtttcttcctgcaagtcgaaggcgcgtcaatcgataagcaggaccatgcggccaatccgtgcggccagatcggcgaaacggttgatcttgacgaagcggtgcagaaggcgctggaattcgcgcgaaaagacggtaataccctggtgatcgtcaccgccgaccatgcgcatgccagccagatcatcccggcggatagcaaagccccggggctgacccaggctctgaacacgcacgatggcgcggtgatggtgatgagttatggcaactctgaggaagagtcgatggagcacaccggcacccaactgcgcattgcggcctacggtccgcatgcggctaacgtcgtcggcctgaccgatcagaccgacctgttctcgaccatgaaagctgccctgagtctcaaataagtcgctgccggtggcgaaattgcgtcaccggctggttttttttctatctgcgtccagacttacaacgttccactcacagaaggatggtgcgatgaaaataactttattgatgaccctactgtttggcttgatctttatcagcgcggttggcgcggcagaaaaaacgcccactcctcagcagcaaaggatgacggactgcaatcagcaagcgtcagccaaaatgctgaaaggtgaggagcgcaaaacctttatgagccagtgtctgaaaaaagagaccacgacctcgcagggaaaggcgctcacccctcagcagcagaaaatgagcgactgcagcaaagcggccacggcgaaatcactgaagggcgatgaacgcagtaccttcatgagtagctgcctgaagaaagcctgaaaaaagggagcgctcgcgctcccttgttctttaacctctcagggcttgaagcccgccagctcagcttcaggagcggctcagtttctctgatttttccatacactgggtgatggcttcgattaccgccgagcggaaccctttctcttccagcacgcgcacggcttcgatggtggtcccgccaggggaacagaccatatctttcagcgcccctgggtgttctccgctctccagcaccattttggcggagcccatcaccgcctgggcggcgaatttataggcctgagcgcgcggcattccgccgaggacggcggcatcggccatcgcttcgataaacataaagacataggccggcgccgaaccgcttacccccaccaccggatggatcatcggctcggcaatttgctccgcctggccaaagcaacggaaaatagtcagcacttcggcaacatcttcgctgctcaccagggcgttaggcgtgacggaggtcataccggcgttaaccagcgacggcgtattcggcatcgcgcgaatgattttgcgatcgtggccaagggcgcgcgccagctgctcaagcgtaacgccggcggcgatagagaccaccagcgactctttattcaggctggaggcgatatcgcccagcactttggtcatgatccccggtttaaccgcgccgaagacgatatcggcaatctgcgccacttcctgggcgctgctggcggcgttgatgccatactggtcgcgcagagctgcaaccttgtccggcgacggggtgtagacccagatttgtcccggctgtacctgaccgctggcgatcagcccgcccagaatggccttacccatattgccgcagccgataaagccaattttcttatccatcaccattcccctctgcttttttcgttacgatctgattagcttaccatcctggcgctttcctgggggagaaaagcaggtaacattggcgtcacttattgcaggtaacaggagctggcatggccatttgggtggatgcggacgcgtgtccgaacgtgattaaagagattttgttccgcgcggcagagcggacccagactccgctgacgctggtggcgaaccagccgctgcgcgtgccgccgtcgcgtttcatccgcaccctgcgggttgagcagggttttgacgtggcggataatgaaatcgttcgccagtgcgcggcgggagatttagtgatcaccgccgacatcccgctggcggcggaggtgctggcgaagggcggggcggcgctgaatccgcgcggggaacgttacagcgaggcgtcgatccgcgagcggctgacgatgcgggattttatggagacattacgggccagcggcgttcagaccggcggcccggatagtttatcgcagcgcgatcggcaacagtttgccgccgagctggagaagtggttgctggcggttaagcgtcgccagggttaaacccagctatcgtcatcgctgccaaaatcatcgtcgccaaagccggcgtcgaagtcgtcgttccaggtattgtcggcaaggaactgatcgtctccctggcggaacggatcgtcacctgcggtggtgtcctgcgcgatgctgtcctgcgcggaggcggcatcaggctgcggcttctcttcgatgatattgactatctcctgcgggtgcgagccgctgaacatattggtcagcatattgcccagcaccacgccgcctgccacgccagcggccgtttgcagcgcgcccgccataaagccgccgccgcgtgcggcagcctgcggggcatagttctgctgcggtggtggcgtatactgcggctgagcgctggcctgcgggcgaccatattgctccgcgcccgggatagggtcagaaccgcgtgacgagccgccaccgccaaacaggccggagaggaagccgccgctgctgggctttgccgcctgcagttggctgacctgactctccagcgcctggatgcgatcgttaagctgtttaatcgcggcttcctggataagaatggtttgcgccatatagtagggggccgccggctgcgcgctcacgtgttgggcaatccgctcctcggcgctggcatcgcgcgatgcgctgtgcgcctcagcctctttcagccgggaaaacagtccatcaataaggcgttgttcttcagattgcatgttacattcctctgtcacactgtcgaataggcatcagggtgcttctgaaacatgatgttgtaaatatgttgcttcgtaaagctatgcataaatgtgttaccgtttacgccagcggtggataaaaaataacgccaagcggaaagtaaagctggttaaacactaaatgcaatgataagtttacattaatagcccctcttctcaccatggtaatggggtgtaaagaagttgtgtaattttttctttacgtatgcattgcgggacagacagcgataatacgtgctttcgttttcatttttttgcgacagacggaaccagggggtcttcggttatgacacagcctatctttcttattgggccacgcggctgcggtaaaaccaccgtcggccatgcgctggcgcgagcgcggcattttcagttctccgataccgatcatcggctacaggcccatgagcagcggacggtggctgagatcgtgcaggcggaagggtgggcgcgttttcgcgaactggagaccctgtcgctgaaggccgtgaccctgccgaatacggtaatcgccaccggcggcggcattgtgctggcggaaggtaaccgtcagtttatgcgggagaatggcgtggtgatttatctgcaggcctcggtgtcggcgctgattgaccgtctggaagcctacccgaaagccgaacagcggccgacgctgaccggaaaaccggtgcgcgaggaagtgggcgaggtgctggcgcagcgcgaagcgttataccgggacgctgcccaccatattgtggatgccacggcctcgccggatcgggtggtggagcagattatgtccatgctatgcagcgcgacggcaaccccggtaagttaagaatttacttacattaaggcggcgaggggcgcctatacttaatagttctgctaccagaagaaggaagaactatgccaaacaggcccccatatccgagagaagcgcgcgtggttgcggtagagaaaggtcctcagggtcagacggtgacctggtatcagctccgtgcggattatcctgagcctgattcgcttatcagcgaacatcctaccgagcaggaagccgtggatgccaaacggcgttatgaagatcctgacaagtcgtaacgtaaccccctgagcccgaattgcccgccatgctggcaatatcgggcgtatctcacattttttatttatcagtcgtactaatgaatatctaacacacggatttttcaggcacggcgccgccgcccgtcaatctttacattcaaccgcggcgtggagctgctacgcttctcgacggttgatttttactcaccaggggggcggatgttgtgtgtggaaagcctgtgttgaagcagtggttgtgaaaaggtacatgatatgagtagtgcaacgatggcaattttgaccatcggcgttgtgccgctggcgggagtattgccgctcctgaccgaacatatcagggaagaacagatcgcccacatcagcctgctgggcgagatgacgcctgacgaggtaatggccgagtacgccgtaggtgacggcgagaaaggactcctgaccttgctcagtaataaccagttggtgatggtgtcgcgacagaaaattgaacgcgatgtccgcagcgcgatcgcgatgctggatcgacaacattatgatgtgatcctgctgctcagttccgaacagctgaccggttttaccacccaccacgcgatcctcctcgagccgcagcggatcatcccgccgctggtggcatcgatcgtcgatgggcaccaggtaggggtgatcgtgccggtggaagagatcatgcccatgcagcggcaaaagtggctctcgctggaaaagtcgccatactacgcgctggccaatccgtttaccggcagcgacagcgagctattaaccgccggcaaaacgctgctggagcagggtgccgacgtgctggtcctcgactgtctcggttactatcagcatcatcgcgatgtgttacaaaaagccctcgatgttccggttttgctgtcgaatgtgctggtttcccgactggcggcagaactattggtctaatgtgttaatttcgcgtgacaggggcaaggagcgccccctatattgagcctttaaccgacgatcagaagggcttgtttatgcttcaaagcaatgaatactttgacggaaaagtgaaatccattggcttcaccagcagcagtaccggtcgcgccagcgttggcgtgatggcggaaggggaatacacctttggtacggcgcagccggaagagatgacggtagtcagcggggcgctgaatgtcctgctgccgggtgagactgagtggaaagtttacgctgccggcgaagttttcaatgtgccaggcaacagcgaatttcatctgcaggtggctgagccaacctcttatctgtgccgctatctgtaagccagcgtgacgcccggcgtctgccgccgggttgttttttccttcctgcccggcaggaaggaaagcggcgcttagcgctgcgcttcgccgccgagcccttccaccaggctttggatcagggcagccagctcgccggtcattaagataaagtcggcgtcaaagcgctgggcgaaatcttcccgatcgatatcttcgttttggtcgcgcagttcatcgcagaacttgaggcgcttaattgacgcgtcgtcgcagatcacaaactgaatacgctgctgccagtccagcgccagcttggtgacgaccttcccggcctcaatgtgtacagcgatttcgtcgctaaccagatcctgcttcttggcgcggatcacgccgccatcttccagcatcgctttcagctcggcttcgtccagcagctggaagccctgcgccacggtgccggagcggacccactcggtcagcgttagctcaatcggattctccagggtcagcggcaccaccggcagcgagccgagggttttacgcagcagggccagagtatcttccgctttcttcgcgctggcgcagtcgaccatgatcaggccgttgacggtgtcgatccacatcattgtctggctgaagcggctgaaggcgcgcggcagtagcgagtgcagcacttcatctttcagggaatctttctcggtcttcttcagcttgcggccctgatcggcttccagcttctggatctttgcctccagcgcctgcttaatcaccggcgacggcaggatcttctcttctttacgcgcgcagataatgatctggccgtttgccgtatgcgtcagcgcgtcgctgtgcgatcccatcggcgacacccaaccggttttcgccatatcctggctgccacaaggggtaaatgtcagctcggccagctgtttttccatctcctcggcgcgcaattcgatatcgcggctgagacggtaaaccattaaatttttgaaccacagcatgataatttccacggctttgtcgttaaatcaggcgggcatgatagcgaattgtcgctatgcttgcattgttaatcggtgaggagctgagcgtgcgtattggtattgatttaggtggaacaaaaaccgaagtgatagccctgagcgaccagggagagcagctgtttcgccaccggttacccacgccgcggcaggactaccggcaaaccatcgagaccatcgccactctggtggcgatggccgagcaggcgaccggacagcagggtaccgtggggatgggcattcctggctcaatttcgccttataccggggtggtgaaaaacgccaactcgacctggctcaacggccagccctttgataaggacctcagcctgcgccttgagcgggaagtccggctggctaacgatgccaactgtctggcggtgtcggaagcggtggacggcgcggcggcgggggcgcaaacggtattcgcggtgattatcggcaccggctgcggcgccggggtggcgctcaacgggcgggcgcatatcggcggcaatggtaacgctggcgaatggggacataacccattgccgtggatgaacgacgatgagctgcgctaccgtgcggaagtcccttgctactgcggcaaacaggggtgtatcgaaacctttatctccggcaccggtttcgccaccgactatcagcggctgagcggcaaagggttaaccggcagcgagattatgcgcctggtgggagaaggtgacgaaaaggctgaactggcgcttagccgctatgaacagcggctggcgaaatcgctggcccacgtggtgaatatcctcgacccggacgttatcgtgctgggcggcgggatgagcaacgtcgaacgactgtatcagacggtgccggacctggtgaagcagtgggtcttcggcggcgagtgtgaaacgccgatccgcaaagcgatgcacggcgactccagcggggtacgcggcgcggcctggctgtggccgctccaggggacctgaaccgcttccccgcacccggatcctctccctcgggagagggttagggtgagggaacatcgccataattcagacctcactccaccgcaaacgctttgtccagccggctatagcccaggccgttaatcttcttcactttgatctgcaccggaatgcggtctttcatcgcctccacgtggctgatcaccccgataatcttaccgctggcgttaagggcatccagggcgtccagcgccgtgtccagcgtttcgctgtcgagggtgccgaagccttcatcaagaaacagggagtcaatccgcgtcttatggctcaccaggtctgacagcgccagggccagcgccaggctgacgaggaaactttcgccgccggagagggtgcgggtgtcgcgcacggcgtcggcctgccaggtatcgacaacctccagctccagcgcctcgctggccttgcgctgtagcagatagcggccatgcaggcggttgagctgctggtttgccagccagaccagattatccagcgtcagcccctgggcgaatttgcggaaccggtcgccggtgctggagccgatcagcgaattgagatagccccagtcgtccgccagctgcgccgcctctgcaatctgctgccccagcgcctgctgctgttgacggctctctgcgtcctgcctgagctgctggcggatctcaccctggcgggtagtgttatcccgcagccgctgggccagggcgtgcagctgggtttgcagggtggggacgtcagcgtccaccccttgcggacgcagcgccaggtgcgcctcatgttgccgggtcgcctgctcgcagagcgcggccgcctgctgaagctgctgctccagcgtctgttttaactgcgtcagccgctgggcggtctcgtcatccagcagcgcggcgaggaacgcctcccgatcgctaaagcggctggcggccagggcggaggtaaattgcgcctgcgactggtccagacgcgccttttcctgggtttcctgctgctgctgggcgacaagctggctgtgcagcgacaggcattcctcgtggatttcgcgccagttgtccgggatggccgactcagcttcaacctctgtctcgtcgctggtcggcagcgtctccagcagtggccgcagagcagcgatttgctgctgaatggcatcatgttgggtctgttgcgcctgccactgggcaaattcgctttcgcgagcgtgcagccaggcggcttctgtcccttctgccggcaggctcagggccagggcctgcagggcgctctccagtccctggcgcgtggccgccagctgctgctcggcctggcgctccagcgcctgctgatcgttaagctgactctgcaacatcaggcgctggctgagctgatagagctgctgttcgtagcgctcctgctcctgcatccagtcgtttatctcttgcgcaatatcccgcgcgatgtgcagagaggcgcaggtctcctgccacgctttagtaagcgcttgctcttcctctgcgagccgcccggccgcttcggtgtcacgctgaagctgttgcgtcagggccttgacctgcccgaggatcagtaggccttcttctttcagcgcggcgacctccttttccagcgcatcgcggcggcgctgattatccgtgagcgtcaacgaggcgtattgttcaatcgccgggtgttcacaggcgccgcacagcggacagggcttacccgcctcgagccggtcgcggtagctttccaggtctttaatcgtttcttcccgttggcagagcgccttcaggtcgagatagtgctggtttttgtctttatattgttcccggcgcagcgtcagggtagcgttaagttttacctgctccgcctgcgcctgctggacgctctcggcgttctggcgcagacgcttgcgcagcagctgatgctgctcatgcagggagagcaggcgctggcgcagcggccgcgattgggtttgctgttctatcgctgcggcaacgtcatccgcgctcagggtgagagggctggctggcagcgtggccagcttctggcgtagcgcggccaggcgggtgctctgagccgttagctgttgtttatcccgcgtcagttgcgagaattgcgctcgccagccggcgatctcctgaccccataagcggaaacgctcatgggcggccagccactgcgccagatcggccagttcagcctgacgctgctgctgagcgcgcaaggcgccctggcggatgcgcgcgcgcagcgccgtgctggcaagtaagcgagcatttacttcactgatccgctgccgggtttgcgccaggcctgccgtctgctcctgctggcgctcccacaggggacgcagttgggcggcgggctgggccagctcaagcttcgccagcgccggggcggcgtccgccagcgcctggcgggcctgctgctgccgggtggcggcctgctgctgttgctgcgccagctcgtcgcggcgggtcagccactggagctgctgctgctggctctgctgctgggccagcagggctttttcttcgtcagtaagtacctgcaaactttcctgcagcgcctgctgctgggcctccgtcaacaggacgatgcccgccgcctgggcttcgaacttctccagcgcgtggcgagcggctttgtgctgttcgtagaccatggctgaaatctggccgtagatttccgtgccggtcagctcctccagcagctccgcgcgatcgctcggcttcgcgttcaggaaggcggcaaattgcccctgggaaagcagcatcgagcgggtgaagcggccatagtcgaggccggtaagcgtcgcggtttgctccagcttatccgagactttatcggcgaggattttgccgtcagcgcagcgcgccagctcgacgcggggcgcctgcagattgccatccggctggttacgggcccggttctggctccagaaagcgcggtaggcgatgccttttacttcaaactcgacttccgccagacactcggcggtatcgcgggtcatcaggtcgttttgcgactgggagaccttgttcaggcgcggcgtctcatgatagagcgccaggcaaatggcatcgagcagcgtggttttcccggccccggtggcgccggtaatggcgaacaggccattgctggcgaacggctcggcggtaaagtctatcttccattcccctttcagggagttgaggtttttcaggcgcagactgaggattttcatgcgttttcgtcctccgcggtgagcgtatgcaccgtatgggcgaacagctcatgcagccgggcgcgcttcatctcgtcaatttcggtcagcgccagccggcgctcgaatacctcctccaccttcagttcactgagcgtctcccgctgggcgttgagcagtattttctcgcgctgctcgcggctgcggcgcaccagcagcacttccaccggcagatcctccgtcagcgcctgaatatgccgctgaatatcgtgcagatagtcctcggtggtgatttcgatatccagccacaccggcgggtcctgctcgacgccgcgccactgctccagctgggcggtgatggtggccagatcgcctttgattactgccagaggctgggtcacgggcacctccagggtttccacggcgctaagtcgcccctcgctaaagctcaccagatgcaccgatttcgctttgccggtttcatcgaagctcagcggcagcggcgagccgctgtagcggatatgctcgcagtcgccgaccatctgcgcccggtgaatatggcccagcgcaatgtagtcggcaggggggaagtgttgcgccggaaaggcatccagtgtgccgatgtaaatgtcgcggacggcatcgcttttgctggcgccgacggtggtcagatggccgctggcaatgatgggcagcggccgatcgccgcgcagcgcgcaggcctgctgatactgctcctgataatagtcgctgatggcgtgcagcagcagctgctgtttttcccgaccggagtgaccggcctggctggtcaccagctcgcgcgggcgtaaaaacggcaccggacagaagatggcgcccggcgtgccgtcgcgcagcggcagctcaatcggcgcgtagccggcgttcgccaccacggtggtgtgtaagaaggcgaggatatcgcgggattcattgagcatcgccaccgagtcgtggttgcccgccagcaccaccaggcgacagccggtctgctgcaactggacgacgaaacggttatacagttcgcgggcgtagctcggcggcgagccggtatcaaaaatatcgccagccacgataatggcgtcgacttcatgctcctgcgcgcggtccagtagccaggtaagaaaagcgtcgtgttcggccgcgcggcttttgctgtaaaaattctggcccaggtgccagtcggaggtgtgaaggaggcgcataaatcttccctagcgaaaaaagcatgggcggcagtataccacttgttagtgaggggtaagtccgcgtcgtgcttcaaaatacccgatcatcagacggtcatttttttcataaatctgtcacaaaagtgacgcataatgacgccgcacttctatactgatggctaaaaaacacagggtaaataatggcgagaagaattctggtcgttgaagatgaagctccaatccgcgaaatggtctgctttgttctggagcaaaatggctttcagcctgtcgaagcggaagattatgacagcgcggtgaatcaactcaatgaaccctggcctgatttgattctcctggactggatgctgccgggcggttcggggctgcagtttattaaactgctcaagcgcgaggcgatgacgcgggatattccggtagtgatgctgaccgcgcgtggagaagaagaggatcgcgttcgcggcctggagaccggcgcggatgactacatcaccaagcctttctctccgaaagagctggtggcgcgaatcaaagcggtgatgcgccgtatttcaccgatggcggtggaagaggtgatcgaaatgcaggggctgagcctcgacccttcatcgcaccgggtaatgaccggcgacagtccgctggatatgggaccgacggaatttaaattattgcacttctttatgacccatccggagcgggtgtacagccgcgaacagctgctgaaccacgtctgggggaccaacgtttatgtggaagaccgcacggtggacgtccatattcgccgcctgcgcaaagcgctggaacacagtggccatgatcgtatggtgcaaacggttcgcggcacggggtatcgtttctccgcccgtttctgaattttgacaggagtgtgacccgtgctggaacggctgtcatggaaaaggctggcgctggagctctttttagcgtgtattccggccctgattctgggggcgtttgtggggcatctgccgtggtttttactggcggcagtgaccggtttgctgatctggcatttctggaatttgatgcgcctgtcgtggtggctgtgggtggaccggagcatgactcctccgcctggccgcggcagttgggagccgctgctgtatggtctgcaccagatgcagatgcgtaataaaaagcgtcggcgcgagctgggaagcctgattaaacgctttcgcagcggggcggaatcgttaccggatgcggtcgtcctgaccacggaagagggggctattttctggtgtaatggcctggcgcagcagattctaaacctgcgctggccggacgacagtggccaaaacattcttaaccttctgcgctatcctgagttcgccaactatctgaaacagcgcgatttttcaaagccgctcaatctggtgctgaataacgcccgtcatctggaaattcgcgtgatgccctacagcgacaagcagtggctgatggtggcgcgcgacgtgacgcagatgcatcagctggaaggggcgcggcggaactttttcgccaacgtcagccatgagttgcgcaccccactgacggtgctacagggctatctggagatgatgcaggagcaggtgctggagggggcgacccgagaaaaagccctgcacaccatgcgggagcaaactcagcgtatggaaggtctggtgaagcagctgctgacgctgtcgcgtattgaagccgcgccggcgctggcgatgaatgatcgcatcgacgtgccgatgatgctgcgggtggtggagcgcgaggcgcaaactctcagccaggagaaacagacgctgatcttcaccgtcgatgagcagctcaaggtgctgggtaatgaggagcagctgcgcagcgccatctccaacctggtctataacgcggtgaaccacaccccgccggggaccgaaattcgcgtcagctggcagcgaaccccgcagggagcgctgttcagcgtcgaggataacgggccaggcattgcgccagagcatattccccgtctgaccgagcgtttttatcgggtggataaagcccgttcccggcaaacggggggcagtggcctgggactggcgatcgtcaaacacgcggttaaccatcatgacagccggctggaaatagacagcacggtgggcaatggaacccgctttagcttcctgctcccggaacgattaattgccaaaaatgacgcctgatcgacgcgctgtcagtttatcttgccaatgaccagcttcagctggtcattttcattggcagtcgttttttctcgcctatttaatgagcgtgcgctgcttttttgttcgcatgataagccacgggttttctatcaatatggtaaatgattctggtgtgaaagacataaccagcataatcatctgcttttgcgatcgtgccttgctttaaaacgttataagcgtttaaattgcgcctgcgcagtcgatgacagactgcttttgcgtggtaataccaaaaacaattctttcccacgccgcttcgggagcatatctcgctgagtttaccggcaatggccgctgtatcgtccctgagaggggagcgcggtatttttccattttttttacaacaccacatccacaggcagtaatgaatttatgacccatcagttaaaatctcgcgacatcatagcgttgggctttatgaccttcgcgttgttcgttggcgcaggcaacattattttccctccgatggttggcttacaggcgggcgagcacgtctggacggcggcgatcggcttcctgatcactgcggtgggtctgccggtgctgacggtggtggcgctggcgaaagtcggcggcggcgttgaaagcctgagcaccccgattggtaaagtggccggtatcctgctggcggtggtgtgctatctcgcggtaggaccgctgttcgcgacgccgcgtaccgcgaccgtctcctttgaggtcggtattgcgccgctgaccggcgacggcccgctgccgctgctgatctacagcgttatttacttcgcgctggtgattctggtctccctctatccgggcaaactgctggacaccgtgggcaatttccttgcgccgctgaaaattatcgccctgattgtgctggcggtcgccgccatcatctggccagcgggcccgatcagcgacgcgctggaagcgtatcgtacggcgccattctccaatggcttcgtcaacggctacctgaccatggataccctcggcgcgatggtgttcggcatcgtgattgttaatgccgctcgctcacgcggcgtcagcgaagcgcgtctgttgacccgttataccgtctgggctggcctgatggcgggcgtcggcctgaccctgctgtatctggcgctgttccgtctgggctctgacagcgctactctcgtggatcagtccgccaacggcgcggcgatcctccatgcctacgtgcagcacaccttcggcggggcgggcagtttcctgctggcggcgctgatcttcatcgcttgcctggtgacggcggtgggcctgacctgcgcctgcgctgagttctttgcccagtatctgccgttctcctatcgcacgctggtctttgttctcggcctgttctccatggcggtctccaatttgggccttagccatctgatccaggtatcgattccggtgctgaccgctatctatccgccgtgtatcgcactggttgtattaagctttacccgcagttggtggcataattcgtcccgcgttatcgcgccggccatgtttatcagcctgatgtttggtatcattgacgggattaagtcatcggcatttgccgcgattctgccggactggaccgcgcgtctgcctctggcggagcagggcctggcctggctgatgcccaccgccgtgatgaccattctcgcggtgatctgggatcgcgcagccggacgtcaggtgacttccagcgcgcattaaccggcggtgaggacaagcgtttaaccacgggacttcgggttccgtggttttttattttttgtgttaaacggcattgaaaaaccacgatggaaagtagtaacaagcttaagcgcgggctaagcacccggcacattcgctttatggctctgggttccgccatcggcaccgggcttttttacggctcggccgacgccattaaaatggccggacccagcgtactgttggcctacattatcggcggcgtcgcggcatatatcattatgcgggcgctcggtgagatgtcggtgcataaccctgccgccagctcattctcccgctatgcccaggaaaacctcggcggactggcgggctatatcaccggctggacctactgctttgaaatcctgatcgtcgccatcgccgacgttaccgccttcggcatctacatgggcgtctggttcccgacggtgccgcactggatctgggtgctcagcgtggtgctgatcatctgcgccgtcaacctgatgagcgtcaaggtgtttggcgagctggagttctggttctcgttcttcaaagtggccaccattatcatcatgatcctcgccgggttcggcatcattatctgggggatcggcaacggcggccagccgacggggattcataacctgtggagcaacggcggcttcttcagcaacggctggctgggaatggtgatgtcgctgcagatggtgatgttcgcttacggcggcatcgaaatcatcggcattaccgccggtgaggcgaaggacccggagaaatccattccgcgcgccatcaactcggtgccgatgcgcattctggtgttctatgtcggcacgctgttcgtcattatgtccatctacccgtggaatcaggtgggaaccgacggcagccccttcgtcctgaccttccagcatctgggcattaccttcgcggccagtattcttaacttcgtggtcctgacggcttcgctgtcggcgattaactccgacgtgttcggcgtgggccgtatgctgcacggcatggctgagcagggcagcgcgccgaaggtgttcgctaaaacgtcgcgtcgcggtattccgtgggtgacggtgatggtgatgaccattgcgctcctgtttgcggtatacctaaattacatcatgccggagaacgttttcctggtgatcgcctccctggccaccttcgccacggtgtgggtgtggattatgatcctgctgtcacagatagccttccgccgccgtctgtcgcccgaagaggttaaggcgctgaaattcaaagtccctggcggggtggtgaccacggtgatcggcctgctgttcctggcctttattatcgcccttatcggctatcatccggacacccgcatctcgctgtacgtcggtatggcgtggattgcgctgttgctgctcggctgggtctttaagacccgccgtgagcgccgcctggcgcaggctcagtaatcgacatcgccccggtcagcatcgcgcgaccggggcggcttgcggtcccgcgtcctcccccgttatcctcccccaaaaagttctgagatgatgagttctgcgcccggcggctatggcaaggtgtgcccattctgcacaatgaggattcacgatgttgaaggcatggcaccttccggttgcaccctttatcaaggtgcaacaggaccgactgtttattactctgtggttaagcggtgagtcgctgccgcagcggatcacgctgcgcgcggaagaggataacgaagagctgtcgctgccgatgcagcggctccgccaggcgccacagccaggcgtggtggcatggcgcggcgaaatctctctcgccagcggccagccgcgccgccgctacagctttaagctgctgtgggccgaccatcagcgctggtttacgccacaaggcttcacccgattcccgccggccagactggagcagttcgccattgacctgccggacgccggcccgcagtgggtggccgatcaggtgttctatcaaattttccccgatcgctttgcccgcagcgccgcgcgtgacgccgaccaggatgcggtctattaccatcacgcggcgggacgggagattgtgcgcaaggcgtgggacgacccgcttaccggcgaggcgggcgggtcgacgttctacggcggggatctcgacggcatcagcgaaaaacttccctacctgaagcagctcggcgtaaccgctctgtatctgaacccggttttcgccgcccccagcgtgcataaatacgataccgaggattatcggcgcgtcgatccgcagtttggcggcgacgcggcgctgctccggctgcgccacaacacccagcgggcgggaatgcgcatgatcctcgacggcgtgttcaaccataccggcgattcccatccctggttcgaccgtcaccagcagggcagcggcggcgccggccacgatccggactccccgtggcgcgactggtttaccttctcagaggaggggcaggcgcacaactggctgggttatgccagtctgccgaagctcgactatcggtcgaccagcctggtcaacgagatctatgccggtgaagacagtatcgtacgccactggctgaaggcgccatggagcatggacggctggcgtctggacgtggtgcatatgctgggcgaaggcggcggggcgcggaataacctgcagcatatcgccggcattacccaggcggcgaagcaagcgcagccggaagcttttgtctttggcgaacattttggcgacgcgcgccagtggctgcaggcggatgccgaagacgcggcgatgaactatcgcggcttcaccttcccgatctggggattcctcgccaataccgatatttcttacgatccgcagaaaatagacgcccagacctgtatggcgtggatggataattatcgcgccgggctgtcgcatcagcagcagctgcggatgttcaaccagctcgacagccatgatacggcgcgttttaaatctcttcttggcaaagacgtagcgcgcttgccgctggcggtggtgtggctgttcagctggccgggggtaccgtgcatctactatggcgacgaggtgggcgtggatggcaataacgatccgttctgccgcaaaccgttcccgtgggatccggcgctgcaggatacccagctgctggcgctgtatcagcggatggcgaaactgcgtaaggcccaccaggcgctgcgctatggcggctgtcaggtgatttacgccgaggataacgtggtggtgtttgtccgcgtctacaaacagcagcgggtgctggtggcgattaaccgcggggaagcctgcgaggtggttatcgaagattccccgctgctgaacgtggccgggtggacgctgcaggagggcgccggcgccttccaggacggggtgctgaccctcccggccatctccgccaacgtctggtccggccgttaatggtagagctggctcagcaggtcgccgcggaggagcgcctcccgccaccagcgctgagccagcccatcattcccgctgcgccaggccatataggtaatatccttttcccgccagcaggcgacgcttttctccaccagactgccttttaccagccacgggcgagcgatatggcgcggcagaaagccgcagcccagcccggcgtacaatagttcgactttactggcgaaatcatcgacgccgatttgcggctgctcgtcgaggagattgctgttgagcggatggcaatagcgggcgctgtcgcggatcacgatggcccgatgctggctgagctgtttattggccagtggctccttcgcctgagccagcgggtgatggggggcgacgacgaagatgttatccaacgcgccgagggtttgccatgaccactccgcggaggtgggcggctcattgatggcgccgaggataatatccgccccatgatgggtcagctcttcccacgaaccggcgagggtgtgatggctgaagttcagtcgcgtctgtgggttttgcgcgtaaaactcggcgatcagcggcagcagagccgaaaagggaaatgaggcgtcaagggcgatggctagctctcgctcccagcccgcgctcagctgctgggcctgcttttccagatctctggcggcacttaaaagctgtcgccccttctccagcatcagccggccggtatcggtaaattttgcccgatggccggaacgatccaacagcacgatgttcagatcgctctccagcttctggatcatatagctcagagcggcgggggttttatacagcgactccgcggcggtggcgaaggatccgtggcggtcaagggcatcaaggatcatcaaaacatcaaagtttacgcgcatatgaagctatccattaatttgttttctctgttgtacctaagcgcaataatcaaagccagtgaataaatcagaacagtttggcgtaaaaatttgattaaaacaggcgtgaataaatcctggtcgcggcaaaaaatataaaccataaaaaatccttaataacttgttagaaataactggctatactcaccatgctttatcagtcaggatccacacgacgcattaatcatcatgtcatctttttaactaattgattaagaaggtatttaatgtctattcgtgaactgctcgatcccactaattccgcgcttatctttattgaccatcagccgcaaatgtcctttggcgtggcgaatatcgatcgccagaccctgaaaaataacaccgtggcgctggcgaaagcgggcaaaatttttaatgtaccggtgatttatacctccgtagagaccaaaagctttagcggctatatctggccggaattattggccgtgcatcctgacgtcaagccgattgaacgtacctccatgaactcctgggaagacgatgcgtttgtggcagcggtgaaagcgaccggccgtaaaaagctggtgatctccgctctgtggaccgaagtctgcctgaccttcccggcgttgatggcgctggaggcgggctacgaggtctatgtagtgacggatacctccggcggcacctctgtcgacgcccatgagcggtctattgaccggatggtgcaggcgggggcggtgccggtgacctggcagcaggtgctgctggagtaccagcgcgactggtcgcgcaaagcgacctacgatgcggtaatggacctggtgcgcgaacacagcggcgcctacgggatgggcgtggattacgcttataccatggtgcatggcgcgccggagcgtaaagcgtaaatcactccatccttcaggctgctgcgttgttggctgcgtttgtccgtccccagctactgaatttattcaagttcacggggacgtgcccgcctgccgcttcaacgcagcatgaaggatgttgtgtcagatcatttatggagagtggcaggagaaaaccggccatttccctgaagcaaggaactcgtcatggcgcagcaaaaatcggtgaccctggttatcagccatctgctcgatccgcaacacagccagcgctacgaagagtggctcggtaaaattatgcccattgcggcagaatttcccggccatcttggggcgaatgtgatccggcccgccgcagggcagaatctgtggagcgtcataatccgcttcgataccctggagcacctctacgcctggacgcagtcggaaacccgtcggcaactggtggctgagattgccccactgctgacggaaggcgatcggactgaggtgcggactgaaccggccttctggtttaccccgccgacggtgaacgtacgccagccgcggcgctggaaacagtttctgatcaccctgctggtgattttccccagcaccaacctggtgcctgcggtgaccggcatgctgctgccgtcgcttaaggggagcctgctgctgcacctcatcaatgatgcctgcgtggttgcgctggtggtctggttctggatgcccatcgtgacccgcctgtttgctggctggttgaagaaaaactgagtcagcctcctcaaggagtgcgttatgtcgcaaactgccacactgattctgacccacggtcagattcataccctcgatcgtgcgaatcccctggcggaagccgtggccatcgccgacggaaaaattgttgccaccggaagtcacgatcggatcatgagctttgccgccgaggggacgcaaatcgtcgatctcaaagggcatacggtgatcccgggcctcaacgattctcacctgcacctgatccgcggtgggttgaactacaaccttgagctccgctgggagggcgtcccctcgctggcggatgccctgcgaatgctgaaggatcaggcggatcgcacgccgtccccgcagtgggtgcgggtggtcggcggctggagcgaatttcagttcgccgagcggcggatgccgaccctggaagagctgaacgaggcggcgcctgatacgccggtgtttgtgctccatctctacgatcgcgcgctgttgaaccgtgcggcgctgaaagccgtgggatataccaaagagacgccggatccggcgggcggcgagatcgtccgcgatagccacggcaacccgaccgggatgctgatcgccaaaccgaacgccatgatcctttacgctacgctggccaaggggccgaagctgccgctggatctgcaggtgaactccacccgtcaatttatgcgcgagctgaaccgactggggctgaccagcgccatagacgccggcggcggcttccagaactatccggaagattacgaaattatcgaacagctgcacgcgaaagatcagatgaccgtgcgcatcgcctacaacctgtttactcagcggccgaagcaggagctggaggatttcgaacgctggaccgacatgctgaagccggggcaggggactgacttctatcgcgccaacggcgccggcgagatgctggtattttcggcggcggattttgaagatttcctgcagccgcggccggatctgccgcaaggcatggaggatgagctggagcgggtggtacgccatctggtggagcatcgctggccgttccgcctgcatgccacctacgatgagtccatcagccggatgctggacgtgtttgagaaggtgaaccgcgatatcccgtttaatggcctgcactggttcttcgatcatgccgagaccattaccgagcgtaacattgagcgggtgaaggcgctggggggcggtcttgcggtgcagcatcggatggccttccagggcgaatattttgtcgatcgctacggcaaagaggcggtgaaacacaccccgccggtagcaaagatgctggcgctggacgtgccggtggggctgggcaccgatgcgacccgcgtcgccagctataacccgtggaccgcgctgtactggctggtctccgggcgcaccgttggcgggatggcgatgtatgacgacgccaaccgcctgccgcgcgatgtcgcgctggagctgtggacggcgggcagcgcctggttctccagcgagcagggcaagaaaggccgtctggccgccggtcagcttgccgatctggtggtgctgtcgaaagactacttcagcgtcgcggaagaggagatcaaaggcattgagtcggtgctgacggtggttgacggcaaagtggtgtacgccgccggtcacttctcgccgctggcgccgccgcctattccggtgctgccggagtggtcgccggtggtgaaggtcccgggccattaccgttccgctccgccggcgacggctaaaatcggcgccatggtgcagatgcaccagtgctgcggtagctgtggcgtccacggccatcagcatgatattgcgcgtaagtcgtcgattccggtctctgacgagcaggccttctggggcgtgctgggctgttcctgctttgccttttgatacctgacgccaccgccccggcagcgtcggggcggtggtttcagccgctggcccggcgtcaatagcgctgctctgagccaaagagcgccatgcggcgggcaatcatctcgcgtaccggctgcagtccctgggcgatgactttccgcggatcgttcacatcgtgcccggtgtcggcggcgaaaattgctttcacctgttggcaccaggcgtacatattttcggtattaacgttaatcttggcggtgccgcaggcaatcgcccggcgcatatcctcatcggcaataccggtgccgccatgcagcaccagcggaaccttcacctgctcggcaatggctttcatctcggtaaatcccagtcgggctttacctttatacagaccatgggtggagcccagcgcggcggcgaggcaatccacctgggtttctgtcaccagggtgtagcactcctggggatcggcgtagatgacttcggaattgacaatgccgtcttcactgccggcgatggtccccagttcggcctccacagagatacctttgctgtgggccagcgtcaccaggtggcgggtaatggccaggttttccctgaacggcagatgcgagccatcaaacataatggaactgaagccggcggcgatcgccgcttcgcaggcctcccgggaggtgccatgatccagatgcagcgccaccggaacatcaatatgcaaatactccatggcgttaaccacaatgtcatgaatacattttaacccgagcatatgcttaaccgtgccgccggacacccccaaaataaccggtgagcggcactgctgggcggtgcttaatacggcgccgacccattccagattattaatgttgaactgaccgacggcgtagccgtcccgcagggcatgctgaagcatgtccttcatcgacactaacatattcacctcttgatatttattaaatgcagttattcttcaaaatattgcgttaagtttctctcgtagctatttaacgagtggtggacgaccgccaggtccggcatcgattcccgaaccccttttttctcaatagaaatggcggcggtcaggctggcaaataaaataatgttatcgatatgccatgagtaatggacgccataggtgaaggcgccgtgaaatacatccccggcgccggtggtatcaacggcattgcacagccaggacgggacgatctgcagcataccgctttttaaaaaagcgcagcctttttcgccaagggtaataaatgcttcaccgcggcaaattttattcaactcaatcagggccgctttaatttctgcttcggtgctcagcgagcgatagctcatataatcgcgggcgaaatgttcgctcactacaaaatagtcagtccaggccgccagtttaatattgctggcgcgcagtgacccgccgtccatcacgaccctggcgttgggcagtttcttaattaaatattcactgatttccgcctcatggccgtcaattaaaatggtgaccggctcctcgctggcaatcagtcgctcggcgaggtcgtccagtttgagcttttgctcgtaggtcagggaaggcggcgtttgcatcttgcgggtaataatcgtccgcgaacccgttaagcgattgaccagcaccgaggccagcggggtgatcatgtcatcggagaaaaccacctggctggtatccacccccgcctcggcaaactcatcgataatgcgctgaccgtaaaggtcctgctgcagatgaccaatgtaataaacctcctcgccccataatcccagcagccaggccgcattggccgccggaccgccgccgctttcaataaaatcatgacaaaagtttttggtattctcctggggccattcattgagaaagaaaaactgatcgaaacaagcaaatccaatggacaaaatagccataaccactcctgattatttgtcagcggcggaaagcgtggccctcccgccgggaaaaatgacctcgcttattcatttttctgcctcgccgtcagctcctcatagctgagcgtgttgcccaccacctggacgtgacggaagcagaaaggcgccagcagcgcgacgagcagcgccagacaaatcagatagatagtgatctgaccaaactgggtgaacgcattcccgataatgatgccccataccgcgaagtcgaaatcggcgaaggtgctgttttcaaacccgaggttgccgagcgccggcagcagcatcgccggcaggaaggcgaggaagatcccgccgataaaggaggcgatgatacatccgcgcttaccgcccagtttgtcggcgaagacgccggacgtgccgccgcagaagaagtgcgggaccatgccgggaataatcagcgccatgcccagcccgccgagcaagagcatcccgaccagcccgcccacaaaggagctgatgaatcccaccaccaccgcggtggggctaaaggtgaagaacaccgcgcagtcaacggccgggatggagtccgggatcagcttctggctgatgccctggaacgccggcaccagatcgccgaggatcagccgcacgccgttatagacaatggctacgccaacggcgaactgcagaccggtcagcaccgagaagatcagcatgttttggtcggtgatggtgctcaggtacgccgacccggcgacagcgctgcagacaaagtagataacaaacatcacgataccggtggtgaccgtggtatcgcgcagaaagccccacttttctgaaatttcggtatcggcgaaggaatttgccggattgccggtccggctggcgatccatgccgagaggtagtagccgagagagccgaaatggcccatggcgatcccgccgtcttcggttacctgcctggtgtaacgctgaccgatggccggggagatggccgaccatgagcccaacaggaatccaccgatcaggatcaacatccagccctggaactccgccgcctgcagaacggcggagaacaggcaggcgagaaagaacgaatgatggccggtcagaaagatatatttatacttggtacagcgggcgataatcagattgaaaataaagcctaacagtaaaatactcatggtttccacgcccagcattttctgggcgacggagacaatggcttcattgttcggaataacgccgcggatattaaatccggcctcgataataccgcccagcggattgagattggcaacgataacgcctgccccagcgctcaacatcaaatagcctaaaatcggctttaatgtgccggtaagcagtttgttaccgggggagcgcagcgccactaaaccaacaaaggcgataagccccattaaaaaggcgggttgactgaatatttccgttaagaaactaagaatagcctgcatggtcgttccctctatgctgattaagagtgagtcgcagcaattttcatcagcgcatcggtaatatcctcggcgatcttcgctttatggacgtagctgcgaatgatggcgacatgacagtgggccggaaattgatttgctagttctttgatcgtgacgtaaaggtcggctttttccccgacggcgttagcaaaatcgaccgaggcgacgtccgctttgatgcctaattcgtcacagatctttttcacattattcgcagccatcaatgagctgccaataccgttaccacaaaccgttctgataactaacataatgactactccatttgtttttgaatgaaatgtaagactgaattaacgtcattttcctgctgaagaaaggtcacaatatctgactcgatcagcgaggctatcagttggatcattttgatatgactgtcagcatcggcgccggcgatcgcgatgaccacggaaaccggatcgaactcatcgtggccgaaggagattggcctggcggtggtgacaagtgagaacccggtctgtaatgcccctttttccggccgggcatgcggcatggcaatcccgtcatctatcacgatggcggcgccaaaatcttcatataccgtcagcatctcgttgacatattcggcgctgcaaatctggcgcctggcaagtaatgaacccgccagttcgatggcctcttccgcatgggaaatattctgcttaagggcgattaacgacgggtcaaaaataatttccatcctcagctcctgaacgtattcctgttcctgagttaaatcatgaccaaatacattgatgaaaatgatggatgagatcacatccgcggttttaaatattgagggggatcacatcgacggcaaagtaccggcagaaaacgatataaataatttataagtttttcaggctgttatgaaggctttgtattttgacgctgaaatttgccagagaaaaagtgagaggtagggcgaattttttcggcagaagtgtatcgctggtcacaaatatcggcgggtcattttcttaaattttgacgccgctaacaaaaaaggcccgcctgagcgagccttttattaaaacgcgtgccgattacaggctggaaacgttttcggtcaggtattttgcaacgccttccggagaggcggccataccttcttttcctttttcccactgcgccgggcagacttcgccgtgctcttcgtggaactgcagcgcgtcaaccatacgcagcatttcgtcgatgttacggcccagcggcaggtcgttaaccacctggtggcgtaccacgccgttagcgtcgatcaggaaagagccgcgcagcgctacgccttcgtccggatgctcgataccgtaagctttctggatttcacgtttgatgtcagcaaccatcgcgtatttaaccgggccgataccgccctggtctaccggggtgttacgccatgcgttgtgcacgaactcggagtcgaaggaaacgccaaccacttccacgccgcgtttctggaattcttcgtaacgtttgtcgaacgcgatcagctcagacgggcacacgaaggtgaagtccatcggccagaagaacagaacggtaggtttaccgttggtgtgctgtttgaaattgaatttctcaacgatctcaccattacccagcacagcggctgcagtaaaatccggcgcttgacgagtgaccagaaccatttgattctcctgtaattactaaggttatttggaacgcaacgcgggcaagtatagagcctggccgctaataacacaaagaggcgctgacaatcgttcagccagcttttacctatcaatcacgtggctattacagctgtttgttttctgccaggcgcatcatttgcggataaaagcgccagaactgcgtctccagacggtcgtaatgggtatccagatcctgccaggagtcgcgtagcgcctcgagacgtggacggcggctggccatgccgttcagcacgcgctgaataaaatccatttcccgatagcgctccagccagcgctccgaccacagatattgattgagattgacgaagcggggcggcgagtcgggcaggatggggacgatctgccgctcggcgtagcgtacgaactcgtccagcggcaggtcaggggagagctgcgcccagtgctgggacaggaaatgatcccacatgacgtcgagggtgatgggggcgacgcggcgggtctgcgggcgaaaccactcccgcgcctctttgacttccgccaggttgtcagtcatcacgtcaatccgccgatgcatatagatgccgtcgatgatctccgccggatagtcgccctgcgggttgccgcgcacgaagtcggccatcaggttgccgggcaacgaactgtcggcgagatgggccaggtgcaggtgggcgagaaaattcataaaacgacatcctttaaatacgagcgggcaggtggaaacaccgatgttgcgctgaacggcgcctcggtggccgaatggcatgctgtctggccgcgcgcggcacctttgccaccggtaaggcattcggttgccgcatggcggcattcggaatgatttggaatatagattatgtcattcatccggaggggtaaaggttgcagccagaccgccccggcactagactacccgcctctttattcagtctgagttaccgtcatgcgcgttaccgattttgcttttgaactacccgaatctctgatcgcccactatccgatgcctgagcgcagtagctgtcgcttgctctccctggacgggccgacgggcgcgctgacgcatggcaccttcaccgacattctcgataagcttaatccaggcgatctgctggtgtttaacaacacccgggtgatcccggcgcgtctgttcggccgcaaggccagcggcggcaagattgaagtgctggtggagaggatgctggatgataagcgcattctggcccatattcgcgcctcgaaagcgccgaagccgggcgccgaactgctgctgggcgatgacgaaagtattaaggccacgatgctggcgcgccacggcgcgctgtttgaagtggagtttaacgacgagcgcccggtgctggagatccttaacgggatcggccatatgccgctgccgccctatattgaccgcccggacgaagacgccgaccgcgagctctatcaaaccgtctatggcaccaggccgggcgcggtagccgccccgaccgccggtttgcatttcgacgaaccgctgctggacaaactgcgcgccaaaggcgttgagatggcgtttgtcaccctgcatgtgggcgcgggcaccttccagccggtgcgcgtcgacagcattgaagagcacaccatgcactccgaatatgccgaagtgccgcaggaggtggtcgatgcggtgctggcggcgaaagcgcgcggcaaccgcgtgatcgcggtgggcaccacctcggtacgttcgctggagagcgcggcgcaggcggcgaaagacgcgctgatcgcgccgttcttcgacgatacgcagattttcatctacccgggttatcagtaccaggtgatcgatgcgctggtgactaacttccatctccctgaatccacactgattatgctggtgtcggcgtttgcgggttatcagcacaccatgaacgcctataaggtggcggttgagcagaaatatcgcttttttagctacggggatgcgatgtttatcacgtacaatccgcaggctatttctgagcgtccctgaaaaggccggtacgccggcttgtagacgccataacgcattttttagctacggaatcattccgtggcgagtatgaaaacgtcggactgtttttctgacgcaggagcaagcatgaaatttgaactggataccaccgacggtcgcgcccgccgcggtcgcctggtgtttgagcgcggcgtggtggaaacaccggcctttatgcccgttggcacctacggcaccgtcaaagggatgacgccggaagaggtggaagccaccggcgcgcagattattctcggcaacaccttccacctgtggctgcgcccgggtcaggagatcatgaagctgcacggcgatctgcacgattttatgcagtggaaaggaccgatcctgaccgactccggcggtttccaggtgttcagccttggcgatatccgtaagatcaccgagcagggcgtccacttccgcaatccgatcaacggcgatccgattttcctcgatccggaaaaatcgatggagattcagtacgatctcggctctgacatcgtgatgatcttcgacgaatgtacgccgtacccggcggactgggattacgccaagcgctcaatggagatgtctctgcgctgggcgaagcgcagccgcgaccgtttcgatagccttggcaataaaaatgcgctgttcggcattattcagggtagcgtttacgaagatttacgcgatatctcggttaaaggtctggtagagattggctttgatggctacgctgtcggcggtttggcggttggtgagccgaaggaagacatgcaccgtattctggagcacgtctgcccgcagatcccggccgataaaccacgatacctgatgggcgtcgggaagccggaagatctggtggaaggggtacgtcgcggtatcgatatgttcgactgcgtcatgccgacgcgcaacgcgcgtaacggccacctgttcgtcaccgacggcgtggtgaaaatccgcaacgcgaagcacaaaagcgataccgcgccgctggacgccgagtgtgattgctatacatgtcgcaattattcacgcgcttacttgcatcacctcgaccgttgcaacgaaatattgggcgcgcgtctcaataccattcataacctgcgctactatcagcgtttaatggctggtttacgcaaggctatcgaagagggtaaattagagagcttcgtgaccgatttttaccaacgtcaggggcgcaccgtgcctcctttgaacgttgattaattttaataatgagggaatttcaatgagcttttttatttctgatgcggtagcggcaacgggtgcaccggcgcagggcagcccgatgtctctgattctgatgctggtggtgttcggtctgattttttacttcatgatcctgcgtccacagcagaagcgcaccaaggaacataagaacctgatgaactccatcgccaaaggtgatgaagtgctgaccaacggcggtctggtcggtcgcgtgaccaaagtagcggaaactggctacattgctatcgcgctgaacgataccactgaagtggttatcaaacgtgacttcgttgctgccgttctgccgaaaggcaccatgaaggcgctgtaatctaacttttcccaaagggaactgccgtgttaaaccgttatcctttgtggaagtacgtcatgctggtcgtcgtcattgtcgtcggcctgatctatgcgcttcccaacctgtatggtgaggatccggctgttcaaatcactggcgcgcgcggcgtcgccgccagtgagcaaacgctgatccaggtccagaaaactttacaagaagaaaaaataaccgcgaagtctgtggcactggaagagggcgctattcttgcgcgcttcgacaccactgatacccagctgcgcgcgcgcgaagcgctgcttaacgtgctgggtgacaaatacgtcgtggcgctgaaccttgctccggcaaccccacgctggctggcggcgctctatgccgagccgatgaagctgggtcttgatctgcgcggcggcgtgcacttcctgatggaagtcgacatggacaccgcgttaggcaaactgcaggaacagaacatcgatagcctgcgcagcgagctgcgcgacaaaggcattccttacgcgaccgtgcgtaaagaagacaactacggtctgagcatcgtcttccgcgacagcgcggcgcgcgaccaggctatctcttatctcagccctcgccatcgcgatctggttatttcctctcagggtgacaacagcctgaaagcggtgatgaccgatgagcgcctgaaagaagcccgtgagtacgcggttcagcagaacattaatatcctgcgtaaccgtgtgaaccagctgggcgtcgccgagccgctggttcagcgtcagggcgctgaccgcatcgtggttgagctgccgggtatccaggataccgcgcgtgcgaaggaaatccttggcgcgaccgcgaccctcgagttccgtctggtcaatactaacgtggaccagtccgccgccgcctctggccgcgtgccgggcgactcggaagtgaagcagacgcgtgaaggccagccggtagtgctgtacaagcgggtgatcctgaccggggaccatatcaccgactcgacctccagcatggatgagtacaaccagccgcaggtcaacatctcgctggacagcgcgggcggtaacatcatgtctaacttcactaaggacaacatcggcaagccgatggcgaccctgttcgtggagtataaagacagcggtaagaaagacgctaacggtcgcgctatcctggcgaaagaggaagaggtgattaacatcgccaacatccagtcgcgtctgggtaacagcttccgtatcaccggtatcagcaatccgaacgaagcgcgtcagctgtcgctgctgctgcgtgccggcgcgctgattgcgccgattcagatcgtcgaagagcggactatcggcccaaccctgggaatgcagaacatcaagcagggtttggaagcctgtctggccggtctggtggtctctatcctgttcatgatcctcttctataagaagttcggcctgattgcgacctcggcgctgattgccaacctgatactgattgtcggcattatgtccctgatcccgggggcgacgctgaccatgccgggcatcgcgggtatcgtgttaacccttgcggtggcggtcgatgctaacgttctgatcaacgagcgtatcaaagaagagctgagcaacgggcgtaccgttcagcaggcgattgacgaaggttatcgcggcgcgttcagctcgatcttcgacgccaacgtgacgacgcttatcaaagtgatcatcctgtacgcggtcggtaccggtgccattaaagggtttgcgattaccaccggtatcggtatcgcgacctcaatgtttaccgctatcgtcggcacccgtgccatcgtgaacctgctgtacggcggcaagcgcgttaaaaagctgtctatctgaggagtgcgttgtggcacaggaatatactgttgaacaattgaaccacggccgtaaagtctgggactttatgcgctgggactactgggccttcggcatttcaggttttctgctgattgtgtcgatcgccatcatcggcgttcgcgggtttaactgggggctcgatttcaccggcggtacggtgattgaaattacccttgagaaaccggtcgatctggaccagatgcgcgattccctgcagaaagcgggctttgaagagccgcaggtgcagaactttggcagcagccgcgacatcatggtacgtatgccgccggtgcatgacgccaacggcagccaggagctgggcagcaaggtcgtgacggtgattaacgaatcgaccagccagaatgcggcagtgaagcgtattgagtttgtcggcccgagcgtcggggcggacctcgcgcaaaccggcgccctggcgctgattgcggcgctggtctgtatcctgatctacgtcggcttccgcttcgaatggcgtctggccgccggggtggttatcgccctggcgcacgacgtggtgatcaccatgggcgtgctgtcgctgttccatatcgagatcgacctgaccatcgtggcctcgttgatgtcggttatcggctactcgctgaacgacagtatcgtggtatcggaccgtatccgtgaaaacttccgtaagatccgccgcggtacgccgtacgagatctttaacgtgtcgttgacccagacgctgcaccgtaccttgatcacctctggtaccactttgatggtgatcctgatgctgttcctgttcggcggcccgattctggaaggcttctcgctgaccatgctgatcggtgtttccatcggtacggcttcctctatctacgtcgcctccgcgctggcgttgaagctgggcatgaagcgcgagcatctgatccagcagaaggttgagaaagaaggggcggatcagccgtctattctgccgtaatccggttcagttgagataaagctatcccggcccttgcggccgggatttttttgcccgcgacaaaacctgctgacagtatgctgtcaggagccctcccatacactgcctctgaactcactaacgagcaggaggaagtatgaataacgtgattaactggtttgaaattccggtcgccgatatggatcgcgccgtcgcgttttatgagccgctgatgcaagtgtcgctgcgtcgcgaaaccatggactgcgccgagctggcggtgttcccgcatcaggatccggcccccggcggcgcgctggccaaatttgaaggtatcgcgccctcggcgcagggcgctattatttatctgcatactgatcatcttgccgccacgctggagcgcgttgcctcggcgggtggggcctgtgtcttcggcccgctgacgctgccgaatgatattggcaccatcgccctgtttaccgacagcgagggcaaccgcgtcggcctgcaccagccggcttaaccttaacttttgtgaagtgagacatgacccgacgcgccgaccgtttatttcagattgtgcagatcctgcgcggcaggcggctcactaccgccgcgctgctggcggagcggttgggcgtgtcggagcgtaccgtctatcgcgatattcgcgatctctccctctccggcgtaccggtggagggcgaagcgggcagcggctaccggctgctggcgggctacgatctgccgccgctaatgctgaccaccaaagagtccgaggcgctgatcgctgcgattcggctgctgaaaacctggggcggtgaggcgctgtcgcagtcgctggagtccgcccaggaaaaaatgctggcgatcctgccggaggcgcgtcggcgccaggcggagcagactcgcctgtttgcccctgaccttggcgcgcatcgctatgctaaaacccattttgacgttatccaccaggccgtatccaatcagaaggtattacagcttcgctaccaggatgaatccggtcaggtgacgtggcgtgaagtgctgcccctggggctgtttttctggggcgaacgctggctgttggtggcctggtgcgaactgcgcaatgattaccgcaattttcgcctcgaccgttgtctggaggtcagaaggaccgaacgtcgattcagcgagtgcgccgaccgctcgttaagcgattttctgcgcaaggtccggtgcgaggtgcgggagaaataaaaaagcccgggcagcaggagctgcggcccgggcgctgtcttgctgtatcagcaatcagaagttgtagccgaccacgaagtaaccaccccagccggtcgagcgaacgctgaacggaccatcgccgaagttcagcttcgcatcatcagcccactggccgccgttatggaagtaacgggcgacgatagagtagtgccagtgcgcgtagttcagcgccaggatgtggctggaggcgatagagttgctggtgcgcgcgtgcttcccgttcagatcgtagaagttgtcatcgccgaggtcagaaccccagtcgaagttggtgaagccgatgtagctcagcgaaccgccccacaggtcggtcagcggcacaaagtatttcactttgaagcgatagccgtcccattcgttttcgttggacgcgccgtagttctgccactggtacttggcgtagacgttcagcgacaggctcattggcaggccggtatcgatatcggtacccagacccatataccaggtgctctgctcctgggagtcgttgcggcccatatcgtagatatagttgttggcgaaataccattctttgaacggcccgaagctcaggtcggtattggtcagcttatcgatagagaaacgcggttcgatctccataaacagcggggaacctttgttccagataccttttgccgtgctgttgccgccgaagaataccggggcatcaatatagccgtagaaatcaaaccagtcttttttggcgaacgcttcgtattccaggtaggtatcgttacggatctgcggtccaaaacgggtgtggtagctgcccaccacgttaacactctggtgccaccagtcagacagatactgcggtttgtcgttttctgccgcgcccgcggcaaaagtagtggagagcgccacaaccgcacccgctgccagtaatgtttttttcatagtaatgccactgtttaaattgagcctgaaggcgttaaaagaagtgccgaagcgtttctaaatatttcgtctttctgtgggggtctattataggaatcattgctcacaaaaatacgtgttgtttcacataaccagaacatgcgtaatcgattgcgttcacgattctatgcatttcttgacaaaatgctactgaaaatcgcgctgcagaacgatttctaatgaactcttgcgaaaagttgtaagtggataagaacgacggggcaggacgtagccgggcggggcaggcccggctgaaggcttactgggcggcggcgggctggatatcgtgtacgcgaataaaaccgactttatctggcgttacattgaggcgcaacgggatatcgacatcgctgggggcgagggtgctggccggcgcgctaatcagctgatcctgaacattgacttcctgatagctatgggtggtgccggtgatctgtccggaagcgacggtggcggtaaaggccggcagcggatcgttggattcgccctgaatgcgtaaggtcaggcgtgacccatcgccatccggggtaatactgcccaccgacatgcgcagggtgccgatctggctctccagccgcgccggggtcttggcctccggcagcagatagacgccgcgggtggatttggcgttcagcgcgttttgctgggtgattttgatcgtttgctggttgagctgggtcatctcctggctcagcgtactcacgctctggtgcatctggcggatttcgctttgctgggcgcaggcggtcagggtgaacaggcagcccgcgatggcgagcttcaggtaacgtcttgtcatggtcaggattccgtttacagaggatgcttaatggtagccaaaccggcctcatctcccatagatcctttgtctcaaaagctctttctttgtagtccggtcacttcgcggtaaactactcttcagtttaactacctgtcaggacgcgctatgcattgccctttctgtttcgccgtggataccaaagtgatcgactctcgtctggtgggggaaggctcttccgtgcgtcgccgtcggcagtgcctggtctgtaacgaacgctttaccaccttcgaagtggcggagctggtgatgccgcgggtggtgaagagtaacgatgtgcgcgaacccttcaacgaagataagctgcgcagtgggatgctgaaagcgctggagaaacgtccggttagcgccgacgacgtggaaatggcggtcaaccatatcaagactcatctgcgcggcaccggcgagcgcgaagtggccagcaaaatgatcggcaacctggtgatggagcagctgaaaaagctggataaagtcgcctatattcgcttcgcgtcggtctatcgcagcttcgaagatattaaagaattcggcgaagagatcgcccgcttacaggactaagccatgcaggacgaaatgtacatggcgcgtgcgctgaagcttgccgcgcgcggtcgctttactacccatcctaaccctaacgtcggctgcgtcattgtgaaagacggcgagatcgtcggcgaggggtttcactatcgcgccggcgagccgcatgctgaagtgcacgccctgcgcatggctggcgaaaaggcgcgcggcgccaccgcctacgtcactcttgagccctgcagccaccatggccgtacgccgccatgctgcgatgcgctgattgccgccggcgtcagccgcgtggtcgccgcgatgcaggatccgaacccgcaggtggcggggcgcggtttgtatcgcctgcagcaggccggcattgaggtcagccatgggctgatgatgaacgaagcggaagcgctgaataagggctttctgaagcggatgcgcaccggttttccctgggtgcagctgaagctgggcgcctcgctggacggccgcacggcgatggccagcggcgaaagccagtggatcacctccccgcaggcgcgacgcgacgtgcagcgtctgcgcgcccagagccatgccatcctgaccagcagcgccaccgtgctggcggacgatccggcgctgaccgtgcgctggcaggagctgagcgccgatacccaggcgctttatcccgaagagaatttgcgccagccgctgcgcgtcgtcatcgacagccagaaccgcgtcacgcctgagcatcgtattgtgcagcaggcgggggaaacgctgtttgcccgcctgcgcgccgatgcacggcagtggccggaaagcgcccgcacgctgctggttccggagcataacggccatctcgatctggtgctgctgatgatgctgcttggcaaacagcagatcaacagcgtctgggttgaggcaggggctacgcttgccggggcgctgctgcaggcgggcctggtcgacgagcttatcgtctatattgcgcctaaactgttaggcaatacggcgcgtggattatgcgcgctgccggggcttgaagagctgagccaggccccccattttaaattcaatgagatacgtcaggttggcccggatgtctgcctgcatttaaccactgcgtgaggctttcctgattattaggaagcagcgctcagaataatatgataaaatccgccccccttgcggggcacatgaacccgaaggaagagtatgaacattattgaagctaacgttgctaccccggacgctcgcgtcgccatcaccattgcgcgtttcaacaactttatcaatgacagcctgctggaaggcgcgattgacgccctgaaacgcattggtcaggtaaaagatgaaaacatcaccgtcgtttgggttccaggcgcgtatgagctgccgctggcggctggcgcactggcgaaaaccggtaaatatgacgcggtgatcgcgctggggacggtgattcgcggcggtaccgcccactttgaatatgtggcaggcggtgccagcaatggcctggcgcatgtcgctcaggacagcgaaatcccggtagcctttggtgttctgaccactgaaagtattgaacaagccattgagcgcgctggcaccaaagccggtaacaaaggtgcagaagctgcgctgaccgcgctggaaatgattaacgtattgaaagccatcaaggcctgatttttgtaaggggaattccgtgaaacctgctgctcgtcgccgcgcccgtgagtgtgccgttcaggcgctctactcctggcagttgtcccacaacgacatcgctgatgtcgaataccagttcctggcggaacaggacgtaaaagatgttgatgttctgtatttccgcgaactgctgtccggagtggcgactaacagcgcgtacctcgacggcctgatgaagccctacctgtcccgccagctggaagagctgggccaggttgaaaaagcggtgctgcgtatcgcgctgtttgagctgtccaaacgtgatgacgtaccgtataaagtggccatcaatgaagctatcgaactggcgaaaaccttcggcgctgaagatagccacaagttcgttaacggcgtgctggacaaagcggctccggtaattcgtccccacaagaagtaaactgcaggccgggttttgcgagggtcgcctcgcagcccggccttatttattattttgctgaggcataacgtatggcatgcggcgaattctccctgattgcccgttattttgatcgcgttaaaagcgcccgccttgatgttgaaaccggcatcggcgatgactgcgcgctcctgcatattcccgagaaaaaaacgctggcaatcagcaccgacaccctggtggcgggcaatcacttcttacccgatatcgaccctgccgacctcgcttataaagcgctggcggtgaacctgagcgacctcgcggcgatgggcgcggagccggcgtggctcacgctggcgctgaccttgccggaggtggatgaagtctggctggaagccttcagcgacagcctgtttgtccagctggactattacgatatgcaactgattggcggcgacactacccgtggcccgctctccatgacgctgggtatccacggctttgtgccgccgggacgcgccatgaaacgcgctggcgcgaagccgggggactggatctatgttaccggcactccgggagatagcgccgccggtctggctgtactgcagaatcgtctaacggtggatgaaccgtctgacgccgactacctgctggcccgtcatctgcggccgatgccgcgcgtgctgcagggccaggcgctgcgtgacctggcgacatcggctatcgatctttccgacggactgatctccgatctgggccatattcttaaagccagcggctgcggcgcacgtatcgatctcgatgccatgccgtactccgatgcgatgctgcgccaggttgattctgagcaggcgctgcgctgggcgctcgccggcggggaagattacgagctgtgctttaccgtaccggagctgaaccgcggggcgctggacgtggctcttggccatcttggcgcgcgttttacctgtatcggacagattgcgccggagagcgaagggctgcagtttatccgcgacggtaagccggtcgcgcttgatttaaagggatacgatcactttgcgtagtcgagacgaggcgcttagccgcctgagtatgcgtaatccgtggcatctgctggcgaccggctttggtagcggcttaagcccggtggtgccgggtacgatgggctcgctggcggcgatcccgttctggtatctgatgacctttctcccctggcagctttactcgctggtggtgatgatgagcatctgtatcggcgtctatctgtgccatcgcacggccaaagatatgggcacccatgaccacggcagcatcgtctgggacgagttcgtcgggatgtggatcaccctgatggcgctgccgaccctggactggcagtgggtggccgccggcttcgtgattttccgtatcttcgatatgtggaagccgtggccaattcgctggtttgatcgcaatatccacggcggaatggggattatggtcgacgacatcgtcgccggcgtgatctccgctggcgtgctgtacgtcattggccatcactggcccatcggtctgctttaaccgcctctccccggcaacgctacgctgccggggaaaccacgcccttcacttaaatcccaccaccggatgcggctgatacggcgcctccagcttgtcgatctgttccggggagagcgtcaaatccaccgcctgcagcagatcatcaagctgttcctgacgcgacgggccgataatcggcgcggcgacgccgggtttgcttaacagccaggcgagggcgacctgggcgcggctggcgtcgagttcttccgccacgtccgcgagattcccggcgatctgcgcatcgttttcttcactggcgctgtacagcgatttgccgaactcatctgagaccagccgggcggtggtctcaccccaggggcgggttagcctgccgcgcgccagcggactccatgggatcaccgctacgccgttacgttggcacaggggcagcatctcattctcttcttcccggtaaatcaggttgtagtgatcctgcatggtgacgaagcgcgcccagccgttctgctgctggagcgccagcgcctgggcaaactgtcgggcatgcatggacgaggcgccgatatagcgcgctttgccggctttcaccacctcgtccagcgcttcgagcgtctcttcaatcggggtggtatagtcccagcggtggatctgcagcaggtcgacatagtccatcccgagacggcgcaggctgtcgtcgatggagcgcaggatctgcgcccgggaaagtccttccgccagatcgccgacctggtgatacaccttggtggcgacaaccacctcgtcgcggcgggcaaagtcgcgcagggcgcggccaacgatctcttcgctgctgccgtcggagtagctatttgcggtatcgaagaagttgatgccgccttcaatggcgtgctggataagcgggcggctgctctcttccggaagcgtccaggcgtgcctgccgcggtccggctcgccgaaggtcatgcagccgaggcagagtcgggaaacacgtaaggcagtatcaccgagggggatatagtgcatagtgcgctcctgctattcatcaagggtatcccttaagcatagcaggagcggaaggggcaattatgccagccagtcgcggattttggcttcaataccggcggcatcaaggccgaggtcggcgcggatctcttcctgagtgccctgaggaataaaataatccggcaggccaatattgagcaccggtaccgcccggcggtgggccatcagcacttcgttcacgccgctgccggcgccgcccatgatggcgttctcttccagcgtcaccagcgcgtcgtgctcgccggccagctggaggatcagcgcggtatccagcggcttcacaaagcgcatatccacgagggtggcgttgagtttgtccgctaccgccgcggcttccggcagcagggtgccaaagttgagaatcgctattttctcgccctgacgtttcaccacccctttgccgatcggcagcgatgccagcggctcgagcgtcgcaccggtgccgctaccgcgcggatagcgcaccgcgcaggggccgtcgctgtagtggtagccggtgtacagcatctggcggcattcattttcatcgctcggggtcattaccaccatatccggaatacaacgcaggaaggagagatcgaacgctccctgatgcgtctggccgtctgcgccgacgatcccggcgcggtcgatagtaaatagcaccggcagcttctggatagccacatcgtggatcacctgatcgtaggctcgctgcaggaaggtggagtagatcgccaccaccggcttgtagtcgccaatcgccagcccggcggcgaaggtgaccgcatgctgctcggcaatggcgacgtcaaagtaccgatcggggaatttcttcgaaaactccaccatccctgaaccttcgcgcatcgccggcgtgatcgccatcagcttgttgtctttggccgccgtttcacacagccagtcgccgaagattttcgagtaggaagggaggccgccgctgcttttgggcagtacgccgctggtatggtcgaattttggcaccgcatggaaggtgatcgggtctttctcggcgggctcatagccgcggccttttttggtcataatatgcaggaactgcgggcctttcaggtcgcgcatgttcttcagcgtgctgaccagaccgagcacgtcatggccatccaccgggccaatgtagttaaagcccagctcttcaaacagcgtgcccggcaccaccatccctttgatatgctcttcggtacgcttaagcagctctttaatcggcggcaccccggagaagacctttttgcccccttcgcgcagggtggagtagagcttaccggagagcagctgcgccagatgattgttcagcgcgccgacgttctcggaaatcgacatttcattgtcattcagcaccaccagcaggtcgggtttgatatccccggcgtggttcatcgcctcaaacgccatgccggcggtgatcgccccgtcgccaatgacgcacaccgcgcgccgctgcttatcctctttcgcggcggcgatagccaccccgatacccgcggaaatggaagtggaggagtgaccgacgctcagcacgtcatactcgctttcaccgcgccacgggaagggatgcaggccgcctttctgacgaatggtgccgattttgtcccggcgaccggtcagaattttatgcgggtaggcctgatggccgacgtcccagatcaggcgatcgaacggcgtgttatacacgtagtgcagcgccacggtcagttccaccgtgccgaggccagaggcaaagtgaccgctggaacggctgacgctgtccagtagatagcgccgcagctcatcacatagcttcggcaggctctcttttggcaacaggcgcaactcctgggtggaatctaccagcgccagggtcgggtatttggcaatatcaaaactcatcagagactcattttttgtttatttatcgcgctgaataatgtaattcgcgagcgcttccagtgccgaagtatccagagattgtgcggccagctcatctaacgaccggcgggcatcagcgatcaggtcgtgcgctttcttccgggcttgctcaagacccaggagggcgggataggtgcttttacccaattgctggtcggcaccctgacgtttgccaagggtcgcagtatcccctaccacgtcgagaatgtcatcctggacctggaaggcaagaccgatattttccgcatagcgatccagcgcgggcagggcagcgcggccgcgttcgccggcgctcagggctcccatccggacggcggcgcggatcagggcgcccgttttatggcgatggatacgctccagcgcctgtaaatcaacctgctgtccctcggcctgcagatccagcgcctggccgccgcacatgcccgccacgccgctggcctgcgccagttcggaaaccatcgccagccggtcccggtcaggaacgtcgaccatcggcgcatcactcagtatagagaacgccagcgtttgcagggcatctcccgcaagaattgcgttggcttcgccaaatttaatatggcaggtcggcaggccgcggcgcagatcgtcatcatccatcgccggcaaatcatcatgcatcagggagtaggcatgaatgcattcgaccgccgcggcaggagcatccagcgtggtacggcacacgccgaacatctcgccggtggcgtagacaaggaagggacgcaggcgtttaccgcctaacaatgcgccataatgcatcgcttccaccagcggagtgttctgaaagggctgcggggcgatgaaacggcgcagcgcttcgtttgcctgttccacacaggcctgcaattgttgcgggaaatccatttattcagcgtccggcgtaaaaggcgtggtcggggaatcttcactatccgccagcaggatctgcacgcgctgttcggccttctgcagctgactttgcccctggcgggccagctgtacgccgcgctcaaattcgcttagcgcttcctctaacggcaaatcgccgctttccagacggttaacgatctgctccagttcgcccagagcagtttcaaagctggccggggcctcatttttctttggcatagtgaatgtagactcttgttatgtcgcgacggcaataccgggtatggtaacgaagtcacgcgtgtaagcaaataacgcgcaatggtgatatactccgcgcccaggatgcaggcaccggtgtgcgctgctttacaacttttgcttatagccccgtcgggcttgccaacgaactattgtcgctatgaagtttatcattaaattgttcccggaaatcaccatcaaaagccaatctgtgcggttgcgcttcattaaaatcttaaccgggaacattcgtaacgttctcaaaaactatgatgagacgctggccgtcgtccgtcattgggatcatatcgaagttcgcgcgaaagatgaaaatcagcgcccggctattcgcgatgcgctgacccgtatccccggcatccaccatattctggaagtcgaagacgtgccgttcacctcgctgcacgatattttcgagcagacgctgccgctgtggcgcgaggcgctggaaggcaaaaccttctgcgtgcgagtgaagcgtcgcggcaaacatgaattcacctcaattgaagtggaacgctacgtcggcggcggcctgaatcagcatattgaaacggcgcgcgtgaagctgaccgacccggacgtcactgtcaatctcgagattgaaaacgatcgcctgctgctggtgaaaggccgctatgaaggcatcggcggtttcccgatcggcacccaggaagatgtgctgtcgctgatctccggcggctttgactccggcgtctccagctacatgctgatgcgccgcggctgccgcgttcattactgcttctttaaccttggcggcgccgcccatgagattggcgtccgtcaggtcgcgcattatctgtggaaccgcttcggcagctcacaccgcgttcgctttgtggcgattaactttgagccagtagtcggcgaaatccttgaaaaagtggacgacggccagatgggcgtcgtgctcaagcgcatgatggtccgcgccgcgtcaaaagtcgcggaacgctatggcgtgcaggcgctggtcaccggcgaagcgctcggccaggtctccagtcagaccctcactaacctgcgcctgatcgataatgtctccgatactctgatcctgcgcccgctgatttcgcacgataaagagcacatcatcgacctggcgcgtgagatcggcacggaagatttcgcccgcaccatgccggaatattgcggcgtgatctccaagagcccgaccgtgaaggcggtgaaggcgaagattgaagcggaagaagaacacttcgatttcagcatccttgataaagtggtggaagaggcgagcaatatcgatatccgcgagatcgcccagcagacggaagagacggtggtggaagtggaaaccgtgaccggctttggcgccaacgacgcgatcctcgacattcgctccatcgacgagcaggaagacaagccgctgaaggtcgagggggttgaagttgtttccctgccgttctacaagctaagcaccaaatttggcgatctcgatcagagcaaaacctggctgctgtggtgcgagcgcggggtgatgagccgtctgcaggcgctttatttgcgcgagcagggcttcagcaacgtgaaagtttatcgcccgtaacaggttgttatgatgcaaaaggccttccctgatggaaggcctttttactattggcaggggagtatattagcgcagggtcagcgccaggtcattgagctgatcgatgacgatattccagccctcgaaaaatcccatctgctcatgctgctcgcgggtttcatcatcggcatgcagcaccgtagccgtatagcgacacccgccctgttcatcggcaaaggtgatgatggccgtcatcgcgaagggggaaacggcggggcgataatccgccgtcagcatcgaggtcatgacgattttttgttgcgggataacctcaagaaaacagccggggttatcgctgcgttcaccgtcaggcccgtgcatcacggtgtgaaaggccccgccggcgcgaaaatcaaaggccagaacctcggtttgccagggcttcgggcaccaccaggttcggagtaatgccgggtcggcccacgcgcgccacagggctggggcgggcgcgctgagcaggcggctgattacaagatcgcgagaatcggttgcgctccgggacatgctgcgactcctcaggaaaaggggagccagcccgcggcgcggaccggctatcaggcttcgtagtaattatagatgccagcggccatcaccagctgtgaggcgacctcatacgctttctcgcgccccaccagcagatcgatcattttcagggcgaaatcaatcgaagtccccggaccctggctggttaacagattcacccgcggatcccagaccactcttttatcctgccactgctcggcggggatatgttccttcagcgccggaaaaccggtcatgttgccgatcgggaacagattatggggtaccagcacggtcgccggggcggcgcagatggcggccacaatgcgcccagagagatgaaactggcggacggtttccaccagtagcgtgctgtcgcggaagcactctgcgcccttgataccgcccgggaggacgatgatatcgaaatcaccatcggccacctcgaccagcggcgcatccgccagcagtttggcgccgcgcgaacagacgatggtcaggctgccgtcgctggcgacgctggcggtggtcacctttactccgccgcggaccagcaggtcgatagtggtgaccgcttcggtctcttcgctaccaggggcgaggcaaatcagtgccgacgcgctcatattcattctccttacgcttgatcaattcaaataagcgggcgttttccggtacggcgacgccgtgggcgcgggcgcggttgagcagaaaaccggtgatgtagtcgatctctgtatgccgctgggcgcgaacgtcctgcagcatggaagagatattttctgccgtactttcaattacctgttcgacataaaatagcaggttttccgccgaggtatgaataccttcgcgctccatcaccgccgccacctcgcgacaaatggccgcaacttcctgcgtatagtcgcgcagatcgccgtttttacaccctttgagcgcggtcagagggttaatcacgcagttaaccgccagcttgcgccagatggccgagtggatattgttatgccaggcgacatccggcagcacgctctgcagaacttctgcgagatagctgtagtccccctcgtagctttttgccggtccgatatgcgtggtgccctgggcaacgtggatgatgacattcccatcgcgccgcgccgcctgggtcgtggaggccagcagcaatggctgtttcacgccgcgcagctcctcgacggtgcccatgccgttatgaatcagcacaattggcgtggtgtccgacaggatcccggccaggtgctttaccgcattcgacacctgccaggcctttaaggtgacgatcagcagctcgctgctggcgagaaaatcggggtcgttggccgtcagcgattcgttgaacactgagccatcggtttcaatgacgttgacgctacagaatggctgcggtacgcgcagccagccctggacttcatgtccctgtttgtacaacgcggtcagccatagttgtcccagcgcaccgcatcccagtacggttactttcattgttcctcctcatctgccgctatcccaggcgctgatggctaaagtctatctcgtcgcttttcgcatcgtcggacatcacggggaaaatagcgcgagcgttgcgtaatcagctaagcttccgggataacaagttgagttatgccgcgttgcaggtattatgcaacgcaaaagaaacggaaggagaggaaaagatgccatctttcgatattgtctctgaagttgatcttcaggaagcccgtaacgcggtggacaacgcgagccgcgaagtcgagtcgcgttttgattttcgtggcgttgaagccacttttgaattaaacgacgccaacaagaccattaaagtgctgagcgagtctgacttccaggtgaaccagctgctggatatcctgcgcgccaagctgctcaagcgcggcattgaaggcacctccctcgacgtaccggaagatatcgtgcacagcggtaaaacctggtttgttgaagcgaagctgaagcagggcattgaaagcgcggtgcagaagaagatcgttaaaatgatcaaagacagcaagctgaaagtgcaggcccagattcagggcgaagagatccgcgtgaccggtaagtcccgcgacgatctgcagtcggtgatggcgctggtgcgcggtggcgatctgggacagccgttccagttcaaaaacttccgcgactaaggcggcgggcagacagcaaaaagcggggaattccccgctttttttatacccctttgatgagctgctctatctcgaagcggttggtgaccttgctgtcgattttgatatacaccgaacgctcctcgggtaccaccagcgcctgatgaaccccgctggcgctcagcagacgcgcctgcagcgcgctgtcgaccaccacgccgtccggcacctccacccgcaggctgctgacgtacggcggctcgctcatggtgctggccaccagcagccacagcatcgccagcagggcgcccagcagaaacacggtttgcgaatcaaagaaaccatcgacccagccgccaagcgcgccgccaatcgccacgccgagaaactggctggtggagtagacgcccatcgcggtgcctttgtagcccgccggagactccttgctaattagcgacggcagcagcgcttccagcaggttaaacgccaggaagaagagctgaacgcccgccaccagctcccagaagtagcctccggcgccccagaggacaatttccgcaatcagcaggatggcgacgcagagcaggaagacgcgcttcatcttgcgcttcacttcggcgtagatgataaacggcaccaccgagatgaatgagataaccatggtgaccaggtaaatcttccagtgctcggcggccgggaagccggcggcctccagttgtccgggcagggcgacaaaagtggacatcagcataatgtgcaggcacatgatgccaaagttaagcttcagcaggcgcggctccgccagcaccttgctaaagcagcccttcaccatcccggattcgcggttaaggacatggttatggctgttgggcaccacccacagggtgagcaggatgccgacggtcgccaggatggcgatcatccagaacagcgcgtgcagacccagctggtgggtgacaatcggccccagcaccatggcgatggcgaaggtgacgccgaagctgacgccgataaaggccatcgctttggtgcggttctgttcgcgggtgagatcggacagcagggccataaccgcggcggcgatggcgccggagccctgcagggcgcggccaagaatgatgccccagatggagtcggtgagcgcggcgatgacgctgccgagcacgaagataagcaggccgccgacgatcaatggcttacggccaatacggtcagataacagtccgaaggggatctggaacaccgcctgcgccaggccgtagataccgatcgccaggccaatcagcgcttcactggcaccctgcaacgccatgccatacgtggtcagaaccggcaggaccataaacatgccaagcatgcgcagggagaatactgtccccaaaccccaggtcgcgcgcagttcccctggcgtcattttgttatcgttcattaccacctcaatataaaaactgcgcctagtgtagcggcggggggtaagaagcgtaaataaatgtttgtttaacagatattacggggctgttgcgcgatgcgacaagttggtaaaaatcaataaaccagtggagggggactccactggcgagggggaaaattaaggtaaagtaaagtcaacccactggctgccagcgtcagccgatttgacgcactgctctacccaatagacgccgtgcagcccggcttcgacgtccggataccagaagtcttgcaggaaggcgcgatcgtcgcggtccgtggcgtcaatcgcctgcgcatagcggcgatagaggttggcccaggcttcgaacagcccttccggatggccgccgccaatgcggtcatccgccagcgcgttcggcgacaggtagggcattccacgttccagaatgcgcgccggctcaccctgcacctcatagctgagctggttaggatgctcatcccaccattcgatgcttgctttttcgccgacgatgcgcactttttgcgagtgcatggcgccgctgttgaccgcgctggtccacatggatccaaccgcgccgttgtcatattccatcaggacaaaggcgttatcttccagcggcgcgcgggagggaacaaagctctgacgggagcacatcagccgtttgatattgagctgcggcgccatggtttcggcgacaaacagcggatgggtggccagatccccaagcacatagctgggcccggcaaacttcggcgttactcgccagcgggtggattctgcctgcagctcgacggcctggttatggaagccgtgggcgaattgcatgttaacgatgcggatctcgccgagcagtccatcggcaatcatctgccgcgcctgctggatcatctgatagccggcatagccgtaggtgacgccgacgattttgttctgttttttgctcagatccaccagctcgcgcgcctcttcggcggtaaagcagaggggcttttcgcagataacgtggagtcccgcctccagcgccgctttggtgatggcgaaatgggtattgttcggggtggtgaccgagacgacctcgatcccgtcagggcgctgcgcctcttcgcgaaacagggtctggtagtcggcgtagcagcgctccggcgcgatgcccagttgctcaccgaacgcgcgcccgcgctcggcatcgacgtcaagcgcgccggccagcagggtataaacattgtcacgcagcgccgcacagcggtggctgtagccgatctgactggttcccccgccgccgaccatgccccagcgcagggaacgggataagggtttcaggccgtttaacatggtgctctcctttttgaaatcatttgcactctgaggcgctcaatgccgacgcctgcggcaacgcgcatccggatagactgacttcaacttaaggaaatgtttgttctgtttcaattgtgttgtggaatttattttccatatatgcgagggggatcgaattagcgatagtttcttttgcgcttggttgaaaaggtgagggcgggatatcgcctgccggagtcgtccagattgttgcgggcgtttttcgtttcaacaaaatatgaaataaattttctttattagctgctgaaggcggtgcaatccgccgattgcaccggggaccagatgccgctatgacgctccgcgcacagacgcgggggaagttgaagcgacgggaggatgaccggccgcaaagatgcccttcgccgccaggcctgcgacggtgagggctgccgggataccgaggatcaaaaagacgctttcaaagggcaggttgagcgccatcatctcggcgccggcaaaggcgctgagaatggcgccgatgcgcccgacgccgtgcatccagctggatcccgtcgcccgcgcctgcgtagggtagtagcgggcggagagggcgttcatgccggtattcgcgccgttcaggcaggcgccgctgataaacgccagcatacagagcaaggcaaagctgcccgcggcgtagcccatcgccatagtgaacaggccgccaacggcgtagattatccccagcgcgcgatgggggttgatcctgtccatcagccagccggcaaacaacgagccgagggtgccgcccgcctggtagatcgccgtcatgatggccgcctggctaacggtcattcctaccgctttaaccagcgttggcagccagctgccgaggatatagaccaggaacagccccataaagtagaccagccatagcatcagcgagccgaaaccgtactggcgggagaggacaatgcgcatcgcgttgccggccgctggctgcgccggtaggataaacctcacattgtcgctgatttgtccgggatagagacggttaagaatggcgcgtatgcgcgccgcgggcgcttgtttgatcaccagaaaacgaaccgattccggcagcagccagatgagcaggggggcaaacagcagcggcagaataccgccgagcgccatcagcgagtgccagccaaactgggggatcagccacgatgccgaaaatcctcccgccgccgcgccgaaggtgaagccgcaaaagatgacggtgataataaatgaacgctggcgttccggggcgtattccgacaccagcgtcccgatattcggcatcgcggcgcccagcccgaggccagtcataaagcgaaagaacatcatctgttctacgttgtgcgagaaggcggtggcgatggtccagaaaccgaagaagaaaacgctgttgatgatgattttcttacgtcccagccagtcggcgagcgggccggagaaaatcgcccccagcgcgaggccgatcagcgcggcgctgatcactagacccagctggtggttgcttaccccccattccagctttagcgtcggggcgataaagcccatgatcgcgatatcaaaaccatcgagagcgatgacgcaaaagccgagaaatataatcagcttctgaaatcggctcagcgggttacgatttattaactctctgacatccaggcgttgagtctgtgtcatagcgtattccttatgcgcaggcgcgcaggtagggctgcgcggcatcgaacagtaactgcgcccgctgaagaggcggcagggcgccttgctcgccgtcaagcggcacttcgagagagaccggcagggtcgccggcagggccgacatcagaccatgcagatccagaccgccttcccccggcacgttgcgcgccgagcgggcctggcggataagttcctgctcgctctccggcctctgcgccgcgccatcgcagagttgcatatagttgagatgatgcgcgggcaggctggagagggcggcgagcgattctcccgcgcgccagaaatggagagcgtctaccagaatgccgatgtcttcccgcccgctggcggcgattagtgcttgcgctgcggcgatgttgcgcaactgggtccagggcatcggctcaagattcatggtcagcccaaatggacgaccggccgcggcgaggatggcgaggttgtcagcgctgcgctgaaggttgtcatcattgccggcgactaacacctgtccggcgccaagacgcgcggcggtctccataaaacgctgcagccgatcgtcgagggtaaacccgggggtcaggcggacgatctccacgtccgacacgcggatgccagtttccatcaacgcggcgagcgtcgcccggacggccggggtatcgcccagcatgtcgtagtccgggtcggtcggtgtggcggggagcagtcgcagcccaacgtgggtaaaaccggttctggccgcaatccgcacctgttcggggggagggacatcgagcagggtcagcgcggcgagcgatagggtacgcttgttcataaagggctccggtacagttgcaggtgaagagagttagggtgcatccattcgtggaaatcaatttatgttattgtttatatttgtttttttgtcaggcctttacccaccagatagccgaaggtcatggcgggcccgagggtgatccctccgctggggtaatagccgcgcatcacgctcgacatgtcgttgccgatggcgtacaggcccggtatcggcagctgctgttcatccagcacccgggcgtgttcgtcggtttgcaatccgctgaaggtgcccagcgagccgggcagaatgcgcaccgcgtagaacggcccttcgcgcagcggtccgagcgtcacctgatggtcaccctgggcgcggttataggctgatgccccgcggtgaaaatcgacgtcttcgccagcgctggcgaagtggttaaagcgttcaacggtttccgccagcgcattggcgtcgatagcgcactgcttcgccagctccgccagggtgtttcctcgctgcagatagccggtacgcagccaggcggtgggggtgaacgggaacggtctggcgtggcccaggccgtagcgacgcagcgcgcgacgatcggccagcagccacgcctgcggcgtgtcgcccgcgggtgtggccgccagcagggcggcgataaagtcatgataagagtcggcctcgttaacaaaacgtttgccgttgggcaggacggcgatcaccccgggtttggcgcgctccaccagatgaggaaacattagctgctggccgctggccagagtgacgcgggacaccggcgcccaggccagcgggtggcgcagggaagtgtcgaactggccgccgacggattcgccaagcctgatcccctcgccctgattgtccggcggtgcggcggagaaatggccgtaaccctccgcagcgtgaggcaccacctgcgccagccgctggcgatcgtggggaaaaccgccgcaggccagcaccacggcgccagcttcgacgtgaatctccccgccgtcgctgcgcagcaccgcgccggacacgcccggcggaccctgcagcagccggaccaccggggcattgagctgaaaacgcacgccggcgtcgagggcggatcgcagcagacgggcgaccagcgcattgccattgaccagatgctgcccccgtccggcgcgtagccgctgccagccgtggcgcagcaggcggcgggcagcatacagcgcggagcgcggcgagcgggtggcattgaaaaaatgcgccatatccgcgccgccggcgatgcccatcccgcccaggctaatggtctccagcggcggacgcaggcgatggagccagtcgccgagcaggcggccatcgtagggttgcgcggtgaccgaccgcccaccgttcgccgcacccggcgacgggtgaaagtccggcatggcgctgcccgagagaaactgcaccgccgtccgctgatggaaaaattccaccatctccggcccgtaacgcaggaaggtttgcagacgaatatcggcggcttcgccccccatcccatgctgcagataggtcagcggcgcgtcggctgcttcgtcgatgccctccgcccgcgccagcgggttgcgggggatccacagccagccgccggaccaggcgctggttccgccgagtactgacgctttctccgccaccatgacgctggcgccgtgcatcgccgcagtcaccgcggcagagagccccgcggcgccggagccgaccaccagcacatccaccttcacaggcccgctcatgttggactccttactgcagaggtgaaaaagcggtggggcgcatcagcaccgactcgaggcgttccacggcggccagttcgcgatttttgcgcgagaaggtctgccagcgttcgtcctgggccatccgcgcgcggcgcaccagacgatcgtccaggctttcataagcccagatatgcactacctgattgaccacgccgatctcggtaaaaaagaagccgattagctggccgagatggtcggtttgcaccgccagggcatcgctttggtacagcgccagccagtcggccattttcagcggattgatggtgtacgtgcgtttttcgtagatcatgatgttttcctgattagtgggtggagtgttgtgccagatggcaggcggcgagatagccaaacgtcagccccgggccgagggtgatgccggggcccggataggtgccggccatcagcgaatccatgtcgtttcccaccgcgtacagccccgggatggggtttccttgggtattgacgacctgggcatcggcggtggtgaccaggccccgtgaggtccccagatcgccggtataaagtttgatggcatagaacggcgcgctgagcaggggggcattacaggcgtcaggctgatggcccggatcgcccatcgcccggttatagctgttgccgcctttagcaaattcccgatctacgccctgcgcggcgtcacggttgtagcgggctaccgtctcgctcagggtttgggcatccagaccaagctgttgcgccagcgcggccagggtatcggctttgtgcagatagccagcggcgaccagggcgtcattattgaccggcgccgggcgcgccagcccgaggccataacgcttcatcgcctgggcgtcgcagagtaaaaaacagggggcattttccgctgcatcctgcattgcgctggcgaaatggtgataggagctggactcgttgacgaagcgtaccgcccgctgattgacggcaatcacgcccggttttgcgcgatcggttaccagatgggggaagcgctcctcgctgccgtcggcccgggtcagcaccgataccggcgcccagaaaaagttggaggcccgatcggctccctcgcgagcgttaaacgccgccgcgagatgcagcgcggcgccatcgttggccggcggcgacatggtgaaatgctcgcgggtgtgcggccgatagcgcgccgccagcgcgcccgcggcgaagccgcctgcggccagcaccaccccgcggcgggcgtgcagcgtctctctttgcccctgatactcaatctccaccccgcggaccgcgccttgcgcttcgcacagcgtcagaacattgacattcagccgcaggttcatgcctttacgcagcgccgtagtcgccatgcgggcaatcagcgcattgcccatcgccaggcgggtaccgcgagggtacttcacccggtcgcgggcatagcgcagcagcagccgggtgcaatgggccagggagcgcagcgagcggcgcatgtcgagaaaatgttgaatatcgacgcggttgaccatcatcccgccaaacagcagcatccccggcggcggtgaacgcaggtcgcgaaacgcgtcccccagttcacggccgtcatactccaccacctccagcgcacgaccgacgtcgactgcgccgggttcatccggatagtaatcgggcgagagcggacgcaggctgtactttactgccccctcacgctcgagaaaggccagcacctcccgcccggcgctgacaaacgcttcggcaagatcttctcggtactggccctcgccgataatggttcgcaggtaggttttcatcgcctcggcgctaccgcttttgccctcggcgcgcgcctggtcggtatcgtgcagccacacggcgccgccggagatggccgaggtgccgccgaactggccggctttctccagcatcagcaccgacagccctttacagcaggcggtgaccgcggcggcaaaaccggccgcgccgctgccgatgacgatcacatcccagctcttcatgccgccgctccctgcgcctgcgggatggcgccgataaactggcccatcagcctcatctgcgccagcgccatttccggcccggtctgtactttacaaccacgtgcggcggcgaaagtgagcaacggcgtcatcaccggggcggtgacaacgtcggccacatgagtggtgctgtcgagcgtatccagcagcgcctgcggtagaggcagctcatcaaatccggccatgccggccggtgagccattaaccagtagatcgaggccgtaaagggtgtctggcagcgcgctcagttgcaccgccggaaaggcctcagccagaaggtcatgcaggcgctgccgggtggccggggtttgatcgtgcagggccagccgacggatccccgcctcgcacagtccccaggcgatggcgctgccgacgccgccgcaaccggagagcatcgcctgcttacctgccggctgaaaaccctgcgcctcggcggcgagctgaaagccgacgccgtccagcatatcgccctgcaggcggccatccgccagcttgcggatcacattgacggcgttgagtcggcgggcgcgcggcgtgaggtcgtcgaccagcgcggcggcgcgttgtttatgcggcaccgtcaccagcacgccggtcatgttctgccagccgcgcagggcgttgaggtaggcggccaccgcgtccgggacgatatccaccgggatcataatgctgtccatgtgctgttcggcaaagtagcggttgaagttatctggcgatttcacctgggcgatcggatgaccaatcacggcgacaacctgggtagttccactgaccatttcaaacctcatttgttaaatgaatgttgtgaaagtatttcagtggaagctgggagcgacaacgcagaattcggacatgtcggttgttaatcgcacgaacgctgcgataatcgcaggaaatcgataatgatgttgcaaaaatgtgagcgaatatgcaaaacaccattcatccacgcgatctgatcgtcggtttacaaaaagggctggcgctaattcagcttttttccaaaacctgcccaaagctcaccgtcgcccagacggcgaaaatgagcggcctgacgcaaagcgccgcgcgacgttttctgctgacgctcctgcatgagcgctatctgcaaaccgacgggcgctattactggcttaccccaaagacgctgcggcttggccaggcctatgtcgattcggcgcagtttcctcgcatggtacggccgattgtcgaatacatcgccagccggaccgaagagcacgcctcggtgggggtggtggatgaagatgaactggtctatatcgcccgcagtcggcatacgccgttcaactctacgtcggtgcggcttggggagcgggtgcccattttctgtaccgccggggggcgactgtggctggcttcgctgccggaagcagagtgtgagaccgtcctgcagcgcataacccgggaacaacgtaccccctatacggtgaccgatatcgcgtcgctgatggagaaaatcgcccaggtacggcgccagggatacgccaccattgagcaggagtttgagattggcatgctggtgctggcggtgccgttaaccgacagggaagggacctggtggggggcgctgagtctgaccagtcatcaatcgcgcacttcgctggaagcgttatgccgcgatcacctcgatctgctctacagcgcgcaggcgatgctggtgggttaaacagggcagccagtggcgctgccctaagatagacgtcgcttaggccgacgctttggtcagaaaggtgttccagtcgctggccgcgttattcacgaaagtattccagctgttgccggcggtgttaacaaagcttccccagttttcctttccggcggtcacaaaggtttcccagtttgactgtccggtcaggaaggaaccaaacgccatcgcgctgtcgccgacgaaggaggcaaatgcggtgccggaggtcagaacaaaagaggtgaagccgacgccagagttggcgacaaagctggcgaagccgctggctgcgccgaacagattaaagccaccggagatatactccatttcgttcagtgttaactctttcattgcaattccttgtagtgattatttcccaaaggggcaagagccccggcgaaaggtagcatcgcaggaccgtgcggcgcgagtgatgcccgatgcgtactggctcaatttttcctcattttttgatatgaaagatagcgggaaagcgacgggggaggggagggaagtatgaaatgagaaagaaagcgatgatgaaacaggaaagaaaaagccccgtaaatacggggctttagatcgtacgggagtgcgtaattatctcacgtaagccagcagactatgtgaatccggcaccataaagtcaacggacatcatcacggacagcgcggtgatggcgacgatagaaaagacgaacagcttacgcgcccagactttatcatcggccactttatagccacgcagcgccatgcccagccaccagacgctgaccgctgccgccacgaccaggtatttatacccggcgtagccgcccagcgagagcatcagggttgccacggcaaaggcgacgatgtacagcgtaatatggtttttggcgaccgaaatgcctttcaccaccggcagcaccggaatattcgccgcctgataatccttaaagcggaaaatcgcgatggcgtaggagtgaggcatctgccacaggctaaagatagccagcaggatcgccgcaccgctgtcgaaatcaccggtgaccgcgcagtagccaatcaccggcggcgcagcgccggagagtgagccaatcagcgtgccgtagacggagtggcgtttcatgtacaggctgtagacgccgacataaaccacgaaccccatcacccccagccagcaggccagcgggttagcgccgaaccacagcagcatgaagccagcaatacccagcaaggtggcgtacaccagcgaagcttctggcgagatcagccctttgaccagcacccggtttttcgtccgttccatcttacgatcgatgtcccggtcgatgtagttgttgaatacacaacccgaggcgaccaccagggatactccaaggagcgtccagacgaacagcggatagtcgatgtggcctttggaggccagcaggaaaccgccgatcacggagatcaggttgccaaaaataatgcctggtttcgttacttgcaggtattgcttaaacatactcgccgctcttagtgcatcatcatgttgtagttcaggttccacataatccagatggagccgacaaccacgatcgcaatgatgattacggtgaagataaatgcggtcaggttccaaccttcatcggacttgctgttcatatgcaggaagtacacgaggtgtaccacgatctgcaccacagcggtcaccagaatggtgccaaggataaccgcatgcgaggcggagccactcatcaccatggcgaacggaatgaccgtcaggatgatggacaggataaatcctgtcatgtagctcttcacgctgccgtgagaagcgccgctatgatcggtagaatgactcattacatcgcccccatcagatagacaaccgagaacacgcagatccacacgacgtccaggaagtgccagaacaggctcaggcacaggatacgcgtgcggttagtgctggtcaggccacgacgtgaaacctggaacatcagcaccgccatccagataagaccggaggtcacgtgcagaccgtgggtgccgaccagcgcgaagaacgcggacaggaagccactacgatccggaccaaagccttccatgatcaggtgatggaattcatagatttccatcccgatgaatccggcgccaaacaaccaggtcaacgccagccaggaaaccacctggcttttgttgtttttgtacatggcgatagccgccatgccgtaggtgatggagctgaacagcagcagtgcggtttcaaccagaacgaacggcagttcaaaaatatctttgcccgtcggtccgccggccgtgccgttcaccagaacggcataggtagcaaacagcgtagcgaagataatgcagtcgctcatcaggtagatccagaaaccgaataccttcatcggtcctgtatcatggtgcccgtgttcatgcgcgtgggcagtatgcgcaagagtatcagttgccatttttcagccctgctttgttaatctcatcgaaatgctgtttttccagtttttcgacttctgcaaccggtacgtagtaatccacgtcctcgtcaaagctcttaataatccaggtcgctacgatgccgatgaagctggcgatcgccatccaccagatatgccagatcatggcgaaaccaaataccgtagcgaaggcggcaatcacgatgccggcgccgctgtttttcggcatatgaatttcttcatagtgagcaggctgtttgtacgcttcacctttctctttcatttcccagaaggcatcacgttcgtgaacctgaggaacgatagcgaagttgtagaacggcggtggagaagaggttgcccactccagcgtacggccaccccacgggtcaccggtcaggtcacggttctgatcgcggtcgcgaatagacacgtagaactgaatcagctggcacagaataccgcaggcgatcagcgccgcaccgcaagctgcaataaccagcatcgggtggaactgcggatcgatctgctggctcagacgacgggtcatacccatgaagcccagcacgtacagcggcataaacgccacgaagaagccgatgatccagaaccagaaagcgcgtttgccccaggtttcgttcagggtgaagccaaaggctttcggccaccagtaggtcagacctgcgaagcaaccgaacactacgccgccgatgataacgttatggaagtgcgcaatcaggaacaggctgttgtgcagaacgaagtccgcgcccggtaccgccagcagcacgccggtcatcccacctacggagaaggtcacgataaagccgatagtccacatcatcgccgagttgaagacgatgcgaccctgatacatggtgaacagccagttgaagatcttaaccccggtcgggatcgcgataatcatggtagtaataccgaagaaggcgtttacgttcgcgccagcacccatggtgaagaagtggtgcagccaaacgatgaacgacagaacggtaatacagacggttgcccataccagagaggtgtaaccgaacagacgcttacgcgagaaggtcgcggcgatttcggagaagaccccgaacaccggcagaaccaggatgtacacttccgggtgaccccaggcccaaatcaggttgatgtacatcatcatgttgccacccatatcgttggtaaagaaatgggtgcccaggtaacgatccagggtcagcagcgcgatggtgacggtcagaattgggaacgaggcgataatcaggatgttagcgcacagagatgcccaggagaataccggcatcttgaacatggtcatgcccggggcgcgcatcttgataatggtcacgaagaagttaataccggtcagggtagtaccgataccggagagctgcagcgcccaaatccagtaatcaacccctacgccaggactgtactcaattcccgacagcggcggataggccagccaaccggtctgcgcgaactcaccaacgcccagagacaggttaaccagaatcacgcccacaacggtgaaccagaagctcaggttgttgaggaacgggaaggctacgtcgcgcgcgccgagctgaagcggaaccaccaggttcatcagaccgataacaaacggcatcgccacgaagaagatcatgataacgccgtgggcggtaaagatctgatcgtagtgatgaggcggcaggaagccggcttccccggccgaggccagcacctgctggctacgcatcatgatggcgtcagcaaagccacgcagcagcatgacgattgccacgataacgtacatgataccgagacgtttgtggtcgacagaagtcagccactcgttccataggtaggaccacttaccgaagtaagtgatggctgccagaagcgccagtcccccaatgataatcgcagccaccgttaccacgataataggttcgtggtagggcactgcatccagtgtaagttttccgaacatcgttttcttcctcggccccttagtgagcggtttccgcgtggctcatgtccatgccttccatcccgtcgtgagcagcgtgctcgccttcaggtttagacatgttcatgctctcgtgagacatgaatttgttcacaacatctttgaacagatccggtttcacgttagagaaatattccactttgttgtattcgctaggcacagccactttctcgaacgcggccatggagtccatggagttcggagactgtttggcttttgcaacccactgatcgaaagtcgcccgatccggggtggcaatcgctttgaacttcatacctgagaagcccgggccactgtagctagcggagataccgtcataagtaccagcttcgtcagcaatgaggtgcagctgagtctgcataccggccattgcataaatctggctacctaagcgcggaataaagaacgagttcatcaccgagttagaggtcactttgaagtgtaccggtacgttcgccgggaaggcgatttcgttaacggtagcaataccctgttccggatagataaagaaccatttccagtccatcgatacgacttcgatggtgattggcttctcgtcatggacaagcggtttgcttggctccagtgcgtgagtggttttccaggtcagaacggccaggaacaggatgatcagaataggtaccgtccagaccacagcttccactttgttggagtgtgaccagttcgggctatacttcgcatctttattgctcgcgcgatacttccaggcaaatcctactgccatcaagacggcgggaataacgacaatcatcatcaggccgaaggccgtcagaatcaaagagcgttgctccagtccaatctgtccttttgggtcaaggagtgcagaatcacaaccactgagtaatacagtacctgcgattaatgacatccatcccaaacttttattgtatttcctgagtctcattgaacgacctcaattccacgggatctggtggcgtttaaagtgtatgggcattttacggtaaggttgcattactgtaaacatgattggatctctgtcagttctgtgttagcggcttctgcttggtttgtcacatatgtaacgtagtgttacttaatcgcttgcaaagcctgattttcgcgggattgataacgaaagggataagaaaaggagtgcttagcggctaatgggcataaccacccacaaattagaacaattgtttaacatttaattatcaaataaaagacattgtgaaaacgaaaaataaaatccccggagctgaatcggttaaattatttaaagaatcgaacgaaaactgtcaataatttccagaaatcaaaaacgcacaaaacaacaaatagcgcggcggacaatataaaagcgttaataagccgttataattacgtttcgtaattacaacggctaataatgatgctggatccttaaatcaggcgggttttacgcagcgccagatagtcaagcaggccgccgaacaaaatcccgccgacggcggtgagcgcggcaacctccagcaggccggacaggaaggagaacgacgtataatccagcgcgttgaggatcagcagcgccagccacaccgcgagcagcaggcagcccagagtcaggatccccagcgccagcgcataggcctgcgggaactcgctacgcggcataaagcttgcggtgcgttgggtatgctcaagcgtttgccggcacagcagcaatagggcaatccccggcaccgccgcaacgacagagaagagatagaaggtcgaccagccgtgagcctcgacaaaccagccggcaatcggcccaacgtatacgcgaccgaccgcagagagcgccgagagcagcgcgaactgggtggcggagaacgacttattacatagcgtcatcagcagcgcgacaaatgccgccgtccccattcccccgcacaggttttcaaagaataccgcggtcgccatggaatagaggtgcttatcggtaatcgacagcagccagtagccggcgttagagaccccctgcagcaaaccgaaaatgagcagtgcccgaaacagcgtcagccgctgcatcaggacgccgccgtacagggcgccgagaatggtggcgaacaggcctaaggttttgttcaccattcccacttcgccagcgtcaaatcccacgccgcggatcaggaaggtggtggtcaggctcatggcaaacgcatcgccaagcttataaaggacgatgagcagcagaatcagccaggcgttgttgcggccgaaaaaatcgcgcagcggttcggctaccgcctgctcgagcgatctgggaaccgggataacgtcgctcggttcgggcgctagcagcgtggcgataatgcagggcaccagcagcgccgccatcagccagtacatcccctgccagccgagatagcggtcggcaagccacagggccagtccaccggagaccagcatccccaggcgatagcccaacacgctgatcgcggcgccggcgccacgctcttctgctggcaacacgtcggttttccaggcgtcgaacacaatatcctgcgacgccgagcagaaggcgatcaccaccgccagcgccgccatccagcgtaattgggtgaccggctcaagaaagcccatcgccgcgatcgccagcaggagtaatacctgggtggtcaacagccaaccgcgacgacgcccaagaaacggcggcgtgtagcggtccatcagcggggaccagaggaatttaaagacataggcctggccgacgagcgagaaaaaaccgatcgttttcagatcgatattttccaccgtcatccaggcctgcagggtaccggaggtgagagccagcggcagaccggaggcgaaaccaaggatcagcaaaatggctgatttcggctgctgaaaaatgcgtaagtaatgactggacatagcataaagcacgaacccggcggaggccgggttcgcgatagcattaacgcgcgttttgcttgatgaaatcgtggatgctggtgtcctgcgccatatcggcgatggtatcggtcaggacgctgttgacggcatcagcgatgtttttgttcgaggcctggaaggcgccttcaacggagtagctggcgcggtagtttttggtcattttcgtgccgtttgccgcggtggcgatgatggcgatatcggctttggtggcgatgttatagcgcacgttaccctgagagacgtcagcatagagtttgttgacgatgatctgcagatcgaccgcgccgttcgggccaatcatgtagccgcgagacgtcatctgtttctccagcacttcctgcagcaggaagcgcagatcgcgggaggcggtgagagtgaccagctgattatcacgcgtcactttcgccagcgcctggtccggacgctgatcggcgccgttgatgctgacggtcacgcccatcaggcttggatcctgctgcggcagcgtgattttcggcgatacttcaatggtggtcggcggcgtggcgcatcctgccagcataaacatggcgaccaacgggaaaagaatcttcttaagcatgttcaggtctcaacgcatggtgttgttataaggaaaattaccgccatcatagcattgccaacggcaaggggaagtggcaacgcgtgtaaatccatcgtgctggcggttttctgagcgtcccgccacggttaatggctcgttccccgacggatctggcgaccagagccagtaaacgtgatacttttgaatgaaaatatcagaacaatgctaattttttgttgttttctcctaatggaagcggtaaaagcggctaacatttaaatggagtggcggcatctcagcgttgtcggaggagaaaattcatgatgatacgtgaacagatcgaagcaaaacttagagcagcgttcgacccgatgtatctcgaagtcgtggatgaaagttatcgtcacaacgtccctgcgggctctgaaagtcattttaaagtggtgttagtgagcgatcgcttcactggcgagcgtttcctcaatcgccaccgtatgatctacggcacgctaaccgaggagctgtcgaatacggtgcatgccctggcgctgcacacctacacgattaaagaatgggaagcattacaggatacggtatttgcttcgccgccgtgccgcggcgcagggagtatcgcttagaaatcccatttgcaaccgctggcgcttttccagtatgttgcttgcagatttagcaaaaacggcctacgggccgttttgttttgcctggaaaatgcgcaaagtcagcgcttttgcgggcaaatttgagcgggaaatgtgaaaaatgccgcagcatcaggcgacaaccgttctcgactcacaaaagtgatgccgctataatgccgcgtcttatatatgaatgtcttcgggatgattctgacgacagggaatgtgtttctgatttgaagagggcatcccggttctgcgaagccacctacacgcgcttccagagttgaccgagcactgtgatttttttgaggtaacaagatgcaagtttcagttgaaaccactcagggccttgggcgccgtgtaacgattactatcgccgctgacagcatcgagaatgctgtcaaaagcgagctggtcaacgtagcgaaaaaagttcgcattgacggcttccgtaaaggcaaagtgccgatgaatattgttgctcagcgctatggcgcttccgttcgccaggacgtgctgggcgacctgatgagccgtcatttcgttgacgcgatcatcaaagaaaaaatcaatccggccggcgcgccgaactacgttccgggcgaatacaaactgggcgaagacttcacctacgcggtagagttcgaagtgtatccggaagttgaactgcagggtctggacgcgatcgaagttgaaaaaccggttgttgaagtcaccgacgctgacgttgataccatgctggaaactctgcgcaagcagcaggcgacctggaaagaaaaagaaggcgcggttgacgctgaagatcgcgtaaccatcgacttcaccggttctgttgacggcgaagagttcgaaggcggcaaagcctctgacttcgtactggcgatgggccagggtcgcatgatcccgggcttcgaagacggtatcaaaggccacaaagcgggtgaagagttcaccatcgacgtgaccttcccggaagagtaccacgcagaaaacctgaaaggtaaagcggctaagttcgttatcaacctgaagaaagtcgaagagcgtgaactgcctgagctgaccgaagagttcatcaaacgtttcggcgtggaagatggttccgtcgctggcctgcgcgctgaagtgcgtaaaaatatggaacgcgagctgaaaggcgctgtgcgtaaccgcgtgaagtctcaggctatcgaaggtctggttaaagccaacgagatcgacgttccggctgccctgatcgacagcgaaatcgacgtgctgcgtcgtcaggctgctcagcgtttcggcggcaacgagaaacaggctctggaactgccgcgcgagctgttcgaagagcaggctaaacgtcgcgtcgttgttggtctgctgctgggcgaagtgatccgcaccaacgagctgaaagctgacgaagagcgcgtaaaagccctgatcgaagagatggcttctgcgtacgaagatccgtctgaagtcgttgagttctacagcaagaacaaagagctgatggacaacatgcgcaacgtggcgctggaagagcaggctgttgaagccgtgctggcgaaagccaaagtgtctgaaaaagccacttccttcaacgaactgatgaaccagcaggcgtaatttcgccgctatcgtttaaggttcgagcaaaaacccgttgccgaaaggcggcgggtttttttttaagataatgatagccacaggcacggtgcgaaaacgcattaaccatgatagcgttacagcaaaagcttgttatgcttgaaatatggcaacaccatccccattaccggggaggcaactgcatccgcaatcgcacgcgtattgaagaggcggtgacgcattcagcggatagaaactgtggctgataatccgtccgtaaggttacaatcagtgcagcaggtattttaaaattactccaggagacggaaatgtcatacagtggcgaacgagacaactttgcaccccatatggccctggtgccgatggtcattgaacagacctcacgcggtgaacgttcttttgatatctactcccgtctgcttaaggaacgcgtcatttttctgaccggccaggtcgaagaccacatggcaaacctgatcgtggcgcagatgctgtttctggaagcggaaaacccggaaaaagacatttacctgtacattaactctccgggcggggtaatcaccgccgggatgtcgatttatgacaccatgcagttcatcaagccggatgtcagcaccatctgtatggggcaggccgcttctatgggcgcgttcctgctgaccgccggggcgaaaggcaagcgcttctgcctgccgaactcccgcgtgatgatccaccagccgctgggcggctatcagggacaggcgacggatattgagatccacgcccgtgaaatcctgaaggtgaaaggacgcatgaatgagctgatggcgcatcataccggccagtctcttgagcagattgagcgtgacaccgagcgtgaccgcttcctgtctgctgcggaagccgtggagtacgggctggtcgactctattttgacccatcgtaattgatgcccaaggcgcaagggtgccgctttacgcttcatccttctcgccacgtctgtgcgagcggttggcttttattcggccgcttgtctggcaggcttgcggccggtggcttcgctaccggctcgatgtagcgcgaaggattttgtgtatatactaatgaagggcggcacaacgctatatggcggcttgcgcctgagaatggcatttgcgtcgtcgtgtgcggcacaaagaacttaaaaagaggtttggactcatgacagataaacgcaaagatggatcgggcaaattgttgtattgctctttttgcggcaaaagccagcatgaagtgcgtaagctgatcgccgggccatccgtgtatatctgcgacgaatgcgttgatttatgtaacgacatcattcgcgaagagattaaagaagtggcgccgcaccgcgagcgcagcgcgctgccgacgccgcacgagattcgccaccaccttgatgactacgtcatcggtcaggaacaggcgaagaaggtgttggcggtcgcggtatacaaccactacaagcgtctgcgcaatggcgataccagcaatggcgtagagctgggtaaaagcaacatcctgctgatcgggccgaccggttccggtaaaacgctgctggcggaaacgctggcgcgcctgctggatgtgccgtttaccatggcggacgccactaccctgaccgaagccggttatgtgggtgaggacgtcgaaaatatcattcagaaactgctgcagaagtgcgattacgacgtgcagaaagcgcagcgcggcatcgtttatatcgacgaaatcgacaaaatttcgcgtaaatccgataacccgtcgattacgcgcgacgtctcaggcgaaggcgtgcagcaggcgctgctgaagcttatcgaagggaccgttgccgccgttccgccgcagggcgggcgtaaacatccgcagcaggagttcctgcaggttgatacctccaagatcctgtttatctgcggcggcgcgttcgctggcctggacaaagtgatttcccaccgtgtggaaaccggctccggcattggttttggcgcgacggtaaaagcgaagtccgacaaagcgagcgaaggggaactgctggctcaggtcgagccggaagatctgatcaagtttggtctgatcccggagttcatcggccgtctgccggtagtggcgaccctgaacgagctgagcgaagaagccctgatccagatcctgaaagagccgaaaaacgccctgaccaagcagtatcaggcgctgtttagccttgaaggcgcagagctcgaattccgcgacgaagcgctggacgccatcgccaagaaagcgatggcgcgtaaaaccggcgcccgtggcctgcgctcaattgtggaagcggcgctgctggataccatgtatgacctgccttcgatggaagatgtcgaaaaagtggtcattgatgagtcggttatcgccggtcagagtaaaccgctgctgatctacggcaaaccggaagctcagcaggcatctggtgaataattaaccatttcactcaagcagttaacaaaaaggggggattttatctccccttttatttttcctgcattcccgccgttgaatgtgtggaatacatccccatatactggattacatattaacgacgatgcagtggagtgtggcgtcgtcggctacctggcggactttaaactaagagagagctctatgaatcctgagcgttctgaacgcattgaaatccccgtattgccattgcgcgatgtggtggtttatccgcacatggtcatacccctgttcgtagggcgggaaaaatctatccgttgcctcgaagcggccatggaccatgataaaaaaatcatgctggttgcgcagaaagaagcgtcgacggatgagccgggtgtaaacgatcttttcaccgttggaaccgtggcgtctattttgcagatgctgaagctgccggacggcaccgtgaaggtgctggtcgaagggctgcagcgtgctcgcatttctgcgctgtctgataatggcgagcatttctcggcgaaagcggagtatctcgactcgccggcgattgacgaacgcgagcaggaagtgctggttcgcaccgctatcagccagtttgaaggctatatcaagctgaacaagaagatcccaccggaagtgctgacgtcgctgaacagcatcgacgatccggcgcgcctggcggataccatcgcggcgcacatgccgctgaagctggctgacaagcagtctgtgcttgagatgtccgacgttaacgaacgtctggaatatctgatggcgatgatggaatcggaaatcgatctgctgcaggttgagaagcgcattcgcaaccgcgtcaaaaagcagatggagaaatcccagcgcgagtactatctgaacgagcaaatgaaagcgattcagaaagaactcggcgagatggacgacgccccggacgaaaacgaagcgctgaagcgtaagatcgacgcggcgaaaatgccgaaagaggcgaaagaaaaaaccgaagcggaactgcagaagctgaagatgatgtcgccgatgtctgcggaagcgaccgtcgtgcgtggctacatcgactggatggtgcaggtgccgtggaatgcgcgcagtaaggtcaaaaaagacctgcgtcaggcccaggagatcctcgataccgatcactatggcctggagcgcgtgaaggatcgcatccttgaatatctcgcggtgcagagccgggtgaacaaaatcaaggggccaatcctttgtctggtgggaccgccgggggtaggtaaaacctcgctgggtcaatccatcgccaaagcgaccggacggaaatacgttcgtatggcgcttggcggcgtgcgcgatgaagcggaaatccgcggtcatcgtcggacctacattggctcgatgccgggcaaactgatccagaaaatggcgaaagtgggtgtcaaaaacccgctgttcctgttggacgagatcgacaaaatgtcttccgacatgcgcggcgatccggcttccgcgttgcttgaggtgctggatccggaacagaacgtggcctttaacgaccactacctggaagtggattacgatctcagcgacgtgatgttcgtggcgacttccaactccatgaacattccggcgccgctgctggaccgtatggaagtgattcgtctctccggctataccgaagatgaaaaactgaacatcgccaaacgtcatctgctgccgaagcagatcgaacgtaacgcgctgaagaaaggcgagctgaccgtcgacgatagcgccattatcggcattattcgttactacacgcgggaagcgggggtacgtagcctggagcgtgaaatctccaagctgtgccgcaaggccgttaagcaactgctgctggataaatcgctgaaacacatcgaaattaacggtgagaatctgcatgattatctcggcgtacagcgcttcgactatggccgcgccgatagtgagaaccgcgtcggtcaggtgaccggtctggcgtggacggaagtgggcggcgatctgctgaccatcgaaaccgcctgcgtgccgggcaaaggcaagctgacctacaccggctcgcttggcgaggtgatgcaggagtcgattcaggctgcgctgacggtggtacgttcgcgggctgacaagctgggcattaacgccgacttctacgagaagcgtgacattcacgtgcacgtgccggaaggggcgacgcctaaggatggtccgagcgcgggtattgccatgtgcacggcgctggtctcctgcctgaccggcaacccggtacgcgctgatgtggcgatgaccggtgaaatcactctgcgtggtcaggtgctgccgatcggcggtctgaaggaaaaactgctggcggcgcatcgcggcggcattaagactgttctgattcctgatgagaacaaacgcgaccttgaagaaattccggataacgttatcgccgatttggatatccatccggtgaaacgaatcgaggaagttctgacacttgcgctgcagaacgaaccgttcggcatgcaggttgtgaccgcgaaatagtgattctgcgcaaattgcgctaataaaaatagggctggtaagtcatttcggacttgccagcctttttttgtgtagctaacttagatcgctggcaggggggtcatcgacaactgctgttgtaagggcatgacagtcctgatataactgctgcgcggtcgcactatgaaggactcaggtgcgatataaattataaagagaggaagagaacagtgaataaatctcaactgattgacaaaattgctgcgggtgcggacatttctaaagctgcagctggacgtgcgttagatgctttaatcgcttctgttactgaatctctgcaggctggggatgacgttgcgctggtaggttttggtacctttgctgttaaagaacgtgccgcccgtactggtcgcaacccgcaaacaggtaaagaaattactatcgctgccgcaaaagtgccgggcttccgtgctggtaaagcgctgaaagacgcggtgaactgatcggctttcccgtcagggaatgtgacgaagtacaagggcgcatcgtgagatgtgccttttttattgccttttcagaccactttatgtgtgtttatcgccacttgtgggctgacaatcaccctgttttcttgtcaaaatacgtcctcacgcgcggcggccatcacgtgctatgctgcgcgagctaaagtcatctacagcggagcgttgttacaccatgatggacaacctacgcacggccgccaacagcgtcgtgctcaagattattttcggtatcattatcgtctcgttcattttgaccggggtgagtggttacctgattggcggtggcaaaaactatgccgcaaaagtgaatggccaggagattggccgtgggcagtttgaaaacgccgtcgccagcgaacgtaaccgtatgcagcagcagcttggcgatcaattctccgagctggcggcgaacgaaaactacatgaaaaccatgcgccagcaggtgctgaatcgcctgatcgatgagtcgcttctggatcagtatgcccgcgagctgggcctcagcatcagcgatgagcaggtgaagcaggcgatcttccagacccaggcgttccagacgaacggtaagttcgacaaccagcgtttcagcggtattgtcgcccagatggggatgaccaccgatcagtacgcccaggcgctgcgtaaccagctgaccacgcagcagctgattaacgccattgcgggtaccgacttcatgctgccgggcgagtccgatcagctggcggcgctggtatctcagcagcgggtggtccgcgaagcgaccatcaacgtaaatgccctggcggcaaaacagaccgccagcgatgaggaaatcaacgccttctggcagcagaatcaggcccgttttatggcgccggagcagttccgcgtcagctacatcaaaatggatgccgccagcatgcaggagagcgcctctgacgaagagattcagtcatggtacgaccagcacaaggatcagttcactcagccgcagcgcaaccgctacagcgtgattcagaccaaaactgaagccgatgcgaaagcggtactggccgagctgcaaaaaggagcggacttcgccacgctggcgaaagaaaaatcgaccgatattatctctgcccgcaacggcggcgatatggggtggatggaagatgcctctaccgtgcctgagctcaaagatgccgggctgaaagagaaaggccagctgtctggcgtgatcaaatcctcggttggcttcctggtagctcgtctggacgacgtccagccggcgcaggtgaagccgctggctgacgtgcgtaatgacattgcggcgaaagtgaagcaggaaaaagcgttggatgcttactacgcgctgcagcagaaggtgagcgatgcggccagcaacgataatgaatcgctggcgagcgcagcgcaggtcgccgggctgaaggtcgtagaaaccggctggtttggccgcgataacctgccggaggagctgaactttaaaccggtcgctgacgctattttcaacggcggtctggtgggtgagaacggcgcgccgggcagcaactccgatatcattaccgttgacggcgatcgcgcttttgttctgcgcattagcgaacacaaagccgaggcggtgaagccgcttgccgaagtgaaggcacaggttagcgatatcgttaagcacaataaagcggaacagcaggcgaaactggaggccgacaagctgctggcggcgctgaaagacggcaaaggcgatgaagcgatgaaggcggctggcctgagctttggcgcgccgcagacgctttctcgtaccggccaggatccgctgagccagctggcatttaccctgccgctgccgcagcagggtaaaccggtctacggcgtgggcagcaatatgcaaggcgatgtggtgctggtagcgctggatgaggtgaaagccggcagcatgccggaagagcagaagaaggccatggttcaggggatcacccagaacaatgcccaaatcgctttcgaagcgctgatgagcaacctgcgcaaggcggcgaaaattaagctcggcgacagcatcgaccagcagcagtaatttcgcgtcgtctcgcaaaaatgagcaacacgatgtaatcctcaagggccgctttcgcggccctttccatttctgtgatttgccttttgtcgactatccgcactgacgctatcgtgaccttgctgtctacacacaaggagatatcagcatgaaatatggaataaaagcactgatggccgcgggcgttctggtttttgcggtaggggtacagggggcgctggcggcacccgccagcggcaaagcggcggtgaataaagaaaatgtgcaggcgtcctcttcggcgaaggcggaagcggtgcccggcgagtctgacaacggggcgacaaaggtcagcattaaccgcgccagcgccgaacagctggcgcaggcgttgaatggcgtaggattgaaaaaagcccaggctattgtcagctaccgcgaagagtacgggccgttcaaaaccctcgatgatctgaagcaggtcccgggaatggggagcgcgttggtggagcgcaatttagcccatctgacgctgtaaattttatgccagaccttgcacagcggtgattttttgccaggataaagaggttgcatcaagtggtgtgacctcttacctcataaacaacaataacagaaaggcattagtgctatgcagacacaaattaaagttcgcggctatcatctggacgtctaccagcatgtgaacaacgctcgctacctggagttccttgaggaagcccgctgggacggcctggaaaacagccccgcgtttcagtggatgatggagaaaaacatcgccttcgtggtggtgaatatcaatattaactatcgtcgtccggcggtactgggcgatgtgctgacggtgagcagcaaactggagcaactcaacggcaaaagcggcaccctaagccaggtggtcaccctcaaccccaatggcgaagtagtggccgatgcgctgattaccttcgtttgtatcgatttgaaaacccagaaggcgctgccgctggaaggggaattgcgtgcgaaacttgaccagatgaacctgcgctgacaaccgtcgtgcgagtggcgggcccacggcaggtgatgaacccgtagccccggtaagcatcgcgccaccggggaatttgagtcaaagctccggtaaatcgatccccggagattatgcctgcgccagtccggttttttgctgcatcaccgccattaccccgaccttgtccgccagatactggttgagtccgtttgcgcgcaggttacaggcggcgcactggccgcagccatcgcccttaatgccgttgtagcaggtgagggtttcccggcgcaccagatccagctgaccccagtagtcggcgagcgcccaggtctcggctttattcagccacatcagcggcgtctcaaagcgaatgtctttcgccatccccaggctgacggcgtggtgcagcgctttgacaaactcatcgcggcagtccgggtagccggagaagtcggtctcgcacacgccggtgatgatggcttcggcttttacctgataggcgtagattgccgtcagggttaaaaacagaatattacgcccggggacaaaggtgttgggaataccctcggcatcaggctgatagtccggtaccggaatgttatcgcgggtcaggctgctgactgccagttcgttgagcagagtgacgtccagcactttatgcgcgacggcgcccagtttcagggcgagttcgcgcgcaacgtcgatttccgcgcggtggcgttggccataatcaaaagtgacgcaatgcacttcatcatactgttgcagagcctgcaccagacaggtggttgaatcttgtcctccgctgaagacaactacggcgcgtttcatggcaattcctgactaaatgaataaaggcgatatggtagcgccagacgccctccatcaccagctctctcacgtcgacgaggccggcagccaggcgctagcgaagtcgaaccagccccgggcgttgaggcgcagaccattgacccccggtggcgcgctgatccgatagttatacttgaacagcggcgtcatgatggcgtcttccatcaggctgttaaatacgttgcgcagcgcatcgttgcggctgcgagcgtcgggctgagactgcaccgcgtctaatgtcgcctgcagatgagcatattgcgccccggtcagcaaattaggccacagcatatcgcagcgcagccactgttccagggcgtactccggtgcttcgccgatcagacggtcgcccatcatcaggtcggcctgccccagatgctggcagccttcccagtttttagcgtcgtgaaacaggagcgtcagctcgcagcccagcagagccagacgttgcctcagctgttcggccatcgcatgtagctcgaccggcagatgatagagcagggtgagcctggccggcagcggtaccgcgttgtttgccggtccctgcgggatggaccatcccggcagcacctcatggcttggcgtaatcagatcctcctccagcggcagcgtatccagtagcgacgagtgatggattatcgacaccagccgctgggcctgcgctttgctaagccgagggctgtggcgcagggtcaaatagcagaagccaaggctgatacggttgctgacctgacgcagattatgcagctcttcgcgatcgccgatggtgatctgcaccggatggcggcagctggtgccgagatcgcggtcaaagagctgaggagtgatccagtactccaccgcctggatcagcggatgctgcaggtggtagcggggatggttttccaggcggacgagttccgcactaaaccgcttcaggcggaacggtccgcagccaatggccggatcgtcgggatgcgccagcacgctgcagtagctggcgaggcggaacggcagccagtagtcagggcgatgcagggttattgttaaacactgggcatgggtgacatcgatacggctgatgctggcgaagagggtccgcaaggcgggcagctcaagcagcagcagtaaccgctgtcgcaactgcgcggtttccaccgtatcgccattgtgccagcacagcgtggagcggatataaaaatgccagcgcaggccgtccggggagacctgccagtggtgcgccagatcgccgatcggcatattgtcgccttcgtcgaagcgcgtcagcccggcatagatttgtccggccagatgctgctcggcgcggccggggagaaagccgggacgcagcggctccagcgggcgatagtaaggaatacgcagcgtgggggtattgttttgccactgaccgccgaggaagggatggagcagggctttcagctccaccggggcaagctgcgccagctccagcgcggtttgctgctgaccgttgttcagcgcctgctccatcatctcgttgcgcagactttccggggttttgtgaaatgagagctgtccgcgtttgccgcgcccggagctggcctgccagcttagccacccggcctcctgcgcctgacgcagcagagtacggacgtggcgctcgctgcaaaaacagcgctccgccagttcgccgacggtgacctgctgcggcgccccggctgagggttgccacaatcgctggtactgatttaaacggtgtaagagtcgcatgggggccgtcgtccaccgggccgctgtaaacccggaacaattaataatatctattcactattacttccgtatatcccaggtgatactgcaacacaagcgaagcccatcacacatcggggaatataccatggcaaaactggcggcatttgatatggacggcaccctgctgatgccggaccatcgtcttggagaaaagacgctttccgcgctgaaacggctgcgtgagcgcgatatcaccttgaccttcgccaccggccgccatgtgctggagatgcaccatgtgattggcgaattttcccttgatgcatttctggtcaccggcaacgggacgcgcatccattcgctggaaggggaggagctttatcgccaggatctcgctcccgaagcggcggaagcggtgctgcacggcaaatgggatacccaggccagcatgcacgtctttaacgatggcggctggttcaccggccaggcaaggcctgaattgttgcaagcgcatgtattcagcggctttcactatcaactgtgcgatctgaagcgtatgtcggcgcagcatgtcaccaagatctgtttctgcggcgatcatgacgatttgcgccgtctgcggatccagctgaatgagacgctgggcgatcgcgcatttctctgcttctcggcaatggactgtctggaggtgctgccggttggctgcaataaaggcgcggcgctggcggtgctcagccagcatttaggcttcaccctgcaggagtgcatggccttcggcgatgcgatgaacgaccgcgagatgctgggcagcgttgggcgggggttcatcatgggcaacgcgatgccgcagctgaaagccgagctgccgcatttgccggtaattggcgactgccggaatcaggcagtctcccattttttaactcattggctggataatcctgatcttccttattcccccgaatagagagacccttccagcaagccagataggcttctatctggctttttttatcgcctttcgaccagaccggcgatctccgcctgccagggcgcaatatcgccgatattgtccgccacccactgcgggttgtaatagctttccaggtaacgctcgccgctgtcgcacaggagtgtcactatcgagccggtgcgaccttcctcgcgcatccgcgtggccagctgcaatacgccccacatattggtgccggtcgaggcgccgaccttgcgcccaagctgcgtttccagccacagggcggtggctacgctcgccgcatccggcacgcgcagcatctcatcgacaacgtcgggaataaacgacggctcgacgcgcggccgtccgatgccttcaattttgctgccgaccgggctgcgcaggctggcgtcgcgggtctgccagtaatcgaggaacaccgaattctgcggatcaacgaccatcagctgcgtctcgtagccctggctgcgaatatagcggccaatggtcgctgaggtgccgccggtgccggcgctcatgacgatccatgacggctgcgggtgcggctcatggctcatctggcggaaaatactgtcggcgatattgttgttgccgcgccagtcggtggcccgctcggcgaaggtaaactgatccatataatggccgttcagctcgcgggccagcgtttcggaagccgcgtagatttcgccggcgctctgcacaaaatggcagcgtccgccgtagaactcgatctgttcgattttgcgcttggcggtgcaggaaggcatcacagcgataaacggcagccccagcaggcgggcgaaataggcctccgaaacggcggttgaacctgaggaggactctataattggcgtgccttctttgatccagccgttgcacaagccatagagaaacagcgaccgcgccaggcgatgcttcaggctgccggtggggtgggtgctttcatctttcagatacaggtggatgcccggaaaagcgggcagcggcagacggatcaggtgcgtgtcggcggagcgctgatagtcagcgttgatttcgctaatggcatgtttaacccaggcgctattcatcgtgatttcctgtttgtcattttgtgcctagcttagcggaaagcgcaggaaaaattgttgccatttaacctgtgaattaccattatgagagcaaaattttctctgaggatgcccaatgctagataaaattgaccgtaagctgctggcgctactgcaggaagattgcaccctctctttgcaggcgctggccgatgccgttaatctgaccaccacgccctgctggaaacgcctgaaacggctcgaagacgagggcattctccgcgggcgcgtcgccctgttggacgcggaaaaggtggggctggggctgacggcgttcgtcctgatcaagactcagcatcatagcagcgactggtactgtcagttcgtgagcgaagtgacgcagatggcggaagtgctcggcttctggcggatggcgggggagtatgactacctgctacgggtgcaggtggctgatatgaaacgctatgacgacttttataaacgtttagtgaacagtgtgcctggtctgtcggatgtcacttcgagttttgccatggaacagataaaatataccaccgccttgcctgtcgaataacggtattgcgccgtaacccattacaaaatcaggattttattgcttgcgattatttgctcaactcagctggtacttccgccgggagtggcgccgctatcttggcgcaattgccctgctggtcattattgccgtcctgcagcttattccgccgaaggtggtgggcattgtggtcgacggcgtgacgcaacagcattacaccgcggagaaggtgtggatgtggatcggcgcgctggtgctgatcgcggtgatggtctacctgctgcgctatgtctggcgcgtgctgttgttcggcgcttcttaccagttggcggttgagctgcgggaagatttttaccggcaactgagccgccagcatccggcgttctatttgcgccatcgcaccggggatcttatcgcccgcgccaccaatgacgtggaccgggtggtgtttgccgctggcgaaggagtattaaccctcgtggattccctggtgatgggctgtgcggtattgattgtaatgtcgacgcagattagctggcagcttactctgctggcgctgctgccgatgccgctgatggccctggcgatcaaacgcaacggcgatgcgcttcacgaacgttttcgcgttgctcaggcggccttttccagcctcaacgatcgcacgcaggagagcctgaccagcatccgcatgattaaggcgtttgggctggaggatcgccagtcggcgcagtttgctgccgatgctgccgataccggcgcgaaaaacatgcgcgtggcacgcattgacgcccgcttcgaccccaccatctatatcgccatcggggccgctaacctgctggccatcggcggcggcagctggatggtgatccacggcagcctgaccctgggccagctgaccagcttcgtgatgtatcttggcctgatgatctggccgatgctggcgctggcgtggatgtttaacatcgtggagcgcggtagcgcggcctatggtcgtatccgcacgatgcttgaagaggcgccggcggtggatgacgggaccgaggcggtgccggcaggccgcggccacctgcaggttgctatccgcgatttcatctatccgcaggcgagcaaaccttcgctggagcaggtaaattttactctccagccggggcaaatgctgggcatctgcgggccgacgggcgccggcaaaagcaccattctggcgctgctgcagcgccattttgacgtcactcacggcgagatccgctttcacgatctgccgctgccgattctgcagctcgacagctggcgcgcccggttggcggtggtcaatcagacgccatttttattctccgataccgtcgccaataatatcgcgctgggaaaaccggacgcgacgcaggcgcagattgagcgggttgcacaactggccagcgtgcatgacgacattctgcgtctgcctcagggctacgagaccgaagtgggcgagcgcggcgtgatgctctccggcggtcagaaacagcgcatctctattgctcgcgccctgctgctggaggccgaaattttgatcctcgacgatgccttatcggcggtggatggccgcaccgagcaccagatcctgcataacctgcgccagtggggggaggggcggacggtcattatcagcgcccaccgcctgtcggcgctcaccgaggccagtgaaattttggtactgcagcatgggcatattgcccagcgaggccgccacgaggcgctggccgtgcagcccggctggtaccgcgacatgtatcgatatcagcagctggaggccgcgctcgacgaggttccgcagacgcaagaggaggctctggatgcgtagctttaccgaactctggccgacgcttaaacgcctgctggcctatggttcaccgtggcgcaagccgttggccatcgcggtggcgatgatgtggattgcggcggcggcggaagtgagcggcccgctgcttatcagctatttcatcgacaacatggtggcgaaacatacgctgccgctgaagctggtggccggcctggcggtagcctatatcggcctgcagctgctggcggcgctcctgcactataaccagtcgctgctgtttaaccgcgccgcggtcggcgtcgtccagcagttgcgcagcgacgtgatggatgccgccctgcatcagccgctcagcgagtttgatacccagccggttgggcagcttatctcacgggtaaccaacgatacggaagtcattcgcgatctgtacgtgacggtggtggctacggtactgcgcagcgccgcgctgatcggcgcgatgctggtggcgatgtttagcctcgactggcggatggcgctggtggcgatcgcgattttcccggcggtgctgatcgtgatgattatctatcagcgctatagcacgccgatcgtgcggcgggtgcgcgcctggcttgccgacatcaacgatggcttcaacgaagtgatcaacggcatgggcgtcatccagcagttccgccagcaggcgcgctttggcgaacggatgcgcgaggccagctatgcccactatctggcgcggatgcagacgctgcgcctggacggttttctgctgcgcccgctgctgagccttttttcctcgctggtgctgtgcgggctgctgatgctgttcggctttagcgcggtgggcacgatcgaggttggggtcctgtacgcgtttatcagctatcttggacgccttaacgagccgcttatcgagctgaccacccagcagtcgatgctgcagcaggcggtggtcgccggcgagcgcgttttcgagctgatggatcgcccgcgccaggcgtggggtagggatgacgcgccgctgagcagcggtcgggtggaaattgaccatctctcctttgcttaccggggggaccgtctggttctccaggatatcacgctggatattccctcccgcagcttcgtggcgttggtcggacataccggcagcggaaaaagtaccctcgccagtctgatgatgggctattacccgttaacccacggcgagatccgcatcgatggtcgaccgctcgcatccctcagccacagcgcgttgcgtcggggcatcgcgatggtgcaacaggatcccgtagtgctggcggataccttctacgccaacgtcgcgctgggtcgggacatcagtgaggcgcaggtttgggaagcgctggaggcggtgcagctggcggcggtggcgcgcagcatgagcgatgggctgtacacccaactgggcgagcagggcaataatctctccgtcgggcagaagcagctgctggcgctggcgcgcgtgctggtggacaccccgcaggtactgattttggatgaggcgacggcaaacatcgactccggtaccgagcaggcgatccagcaggcgctggcgaaggtccgccagcataccaccctcgtggttattgcccatcggctgtcgaccattgtggaggccgataccatcctggttctgcatcgaggtcaggctgtcgagcggggcacccatcagcagctgctggcggcgaaaggccgctactggcagatgtatcagctgcagctggccggcgaagagctggcggccagcgccagagaggagtcgctcagcgcctgatgcaccaccagcaggcagggaacgctgggcggcctgcgatggtgcaaaaacgttacatcaaatgcaccgttgtggtgcatttttgcgcgccaggcgccgttgcgcaggatattgcctgacctgtcccctgttttttgccatcaaagggccgctttgcggccttttttcatttctggcatagcccttgctttatatccatcgtgttagctgcggccattaccgaatactgactggaggggacttatgaagctggttaccgtggtaatcaaaccattcaaactggaagacgtgcgtgaagctttgtcttccatcggcattcagggcctgacggtcactgaagtcaaaggatttggccgtcagaaaggtcacgcggagctctaccgcggcgccgagtatagcgtcaactttctgccaaaagtgaagattgatgtggcgattgccgacgatcagctggatgaagtcatcgatgtcatcagcaaagcggcttacaccggaaaaattggcgacggcaaaattttcgtcgctgaattgcagcgcgtcattcgcatccgtaccggcgaagctgacgaagcggcactgtaatttccagaccacacagtgatggggaacgaaacaatgaaaatggcaacaatgaaatcgggtctgggggcattagcccttctgccggggctggcgatggccgcgcctgcggtggcggacaaagccgataacgcgtttatgatgatttgcaccgcgctggttctgtttatgactatcccggggattgcgctgttttacggcggcctgatccgcggtaagaacgttctgtccatgctgactcaggtgattgtcacctttggcctggtctgcgtattgtgggtgatttatggctataccctggccttcggcactggcggcagcttcttcggcagctttgactgggtgatgctgaaaaatattgagctgaaagcgctgatgggcaccttctatcagtatatccacgtggccttccagggctcgttcgcctgcatcaccgtcgggctgattgtcggggcgctggcggaacgtattcgtttctccgcggtactgatcttcgtggtggtgtggatgacactctcctacgtgccgattgcgcatatggtttggggcggcggtctgctggcgacccatggcgcgctggacttcgccggcggcaccgttgtgcacatcaacgccgcggtcgccgggctggtgggcgcctatatgatgggcaaacgcgtgggcttcggcaaagaagcgttcaaaccgcataacctgccgatggtgttcactggcaccgctatcctctacgtgggctggttcggcttcaacgccggctctgccagcgcagcgaatgaaattgcggccctggcgttcgttaacaccgtcgtggcgaccgctgcggctatcctggcgtggacctttggcgaatgggctctgcgcggcaaaccttcactgctgggcgcctgctccggggcaattgccggtctggttggcgttacgccggcgtgtggttatatcggtgtcggcggggcgctgatcgtcggtatcgcctctggcctggcgggtatctggggcgtgactgcgctgaaacgctggctgcgtgtggatgatccttgcgacgtcttcggcgttcacggcgtctgcggcatcgtcggctgtatcctgactggtatcttcgcggcgacttctctgggcggcgtcggttatgcggaaggcgtcaccatgggccatcaactgctggtgcaactggaaagtatcgccatcaccgtggtctggtccggcgttgtggcgttcatcggctacaaagtggcggatatgaccgtcgggctgcgcgtgccggaagagcaggagcgcgaagggctggacgtcaacagccatggcgaaaacgcctataacgcctgataaaaaagccattctctcctgatagcgaaaagcctcccgtccgggaggcttttttatgcgttgcggttgcgcatcaccccttcctgaacagttgaggcaaccagcgtgccatcctgggtgtagaattcgccgcgaacgaagccgcgggcgctggaggccgaggtgctttcgacgctataaagcagccattcattaatattaaacggccggtggaaccacatagagtggtcgatggtggcgacctgcatgccgggctcaaggaaaccaacgccgtgcggctgcagcgccaccggcaggaagttaaagtctgaagcatagcccagcagatactgatgaatacgcagatcgtcagggacggcgccgttggcgcgcagccagacctggcgcaccggttcggcgatatggcctttcattgggttatgaaactccaccggacggatctccagcggtttatcgcagaggaatttgtctttcacctgcggcggcaggagatgcgccagcttgcgagcgatatcggtttccgaaggcaggccgtcaggggagggggcggccggcattgctttctgatgctcatagccattctctggcgcctggaaggaggcggtcatatagaaaatcggcttcccgttctggatggcggcgacccgacgggcgctgaagctgttgccgtcgcgcagcacctccacatcgtaaacgatcggcttctggctatcgccggggcgaagaaagtagctgtgaaacgaatgaaccagacgctcaacgggcacggtctcttttgccgcatacagcgcctgacccactacctggccgccaaaaacctgacgtaaccccaggtcttcgctctgcccgcgaaacaacccttcctcaattttttccagatctaataatgccagcaggttagagagtgcctgactcatacttatcctcaattaacaatagcggcgcagcgcgcgtaatgtggccaagtataacctggaatcgcaagtggtccgatgggtgtaataatctgaataacgaccagttaacaggaacaaatctgagatctgtgccacacttattgacgacacgaaagttcctgccggcgaagcggcggaacatcctcctgggtattaagggatgataaggagaacatcatgaaatttgcctatatgtttagtgccttagccgtcgccgcgacgctgaccgcctgtgctaatcaccactcgaacaattcttcgacgcaggcggccgcgcccgacccttacggtatcgcgacgctgagcgtggcgcagcagcagccgagcgtcacggggacgattaatatccgccagagaatcgctttaccgccggatgcggtactgacggtgaccctgtcggatgcttctctggcagatgcgccagcccgcgtattgtcgcaaaaagcggtgcgtaccgaaggcaaacaggcgccatttaactttgcgctgccttacaacccggcagatattcaaccgaacgctcgcattctgctaagcgcggcgatcacggttaacggccagttgatgtttattaccgataccgtgcagacggtaataaaccagggcggcactcatgccgacctgacgctggttccggtccagcagaccgccgttcctgtcgcccagtaagctcgctacgcccccggatgggggcttttttttgccttcaataaacccagcgataatgctggagatcgatatggccgctgccggagacctgcacaccctcggccagcagcgcctgacgctgccgctgtagatcggggccggtgagggagatatcgccatggcgattgaccacccgatgccatggcagggtggacccttccggcaggcgcttcaatacgccgcccacctggcgcgccgcgcgcggtgaacctgccagccgggcgacctcgccgtaggtcgtgacatacccttccggtatcgacgccacgatgtgccagacgcgttggggaaatgtgtcgtgcggagccattttctgtcctgttaccggcaaaacgtcagcataagcgctaagccaggagctgtacagccggcctgggtcaggcggcctgttcgacggtgaacgtcagagcgaggccgaggatctgcatgccatggacattgtcggaggctgagctggcgatgagactctcaagaaatttcaaccgctgcgaagtggcgttgatgatcagcctcgcgcgcaggcccggcatggttaacgacgagatagggtacaccacccgaccgctgatatagaccggcagcttgcgtagctccacctggcgcagcacgccgacggtggaatagagcagcgccagcggcgtaaccgcccgcaccggcgcgggactgatggtcgcgaagtcgagcattttttcaggacgcaggtagtttacgccctgaaaggcgatagtcatcccttcaatagcaggtaaaggcagagtgatggtctgtggtgatgagtcagtcattcgattaccgtcgagacaatgtactggtgataaaagaggacgaagaggataagtatggtggataacccggatgtgtgctgagcgcgggctcgcaatctcacaggctgaccgtgagtggctggttttattcgcgttattgcgcaataaaccagcaggcggacggtgtgagcttgcaattcaccaggtcagcagggataatgcgccagcgcgttaggcaactaacgctctcaatgggggctctgttggttctcccgcaacgctactctgtttaccaggtcaggtccggaaggaagcagccagagcagacgacgtgtgtgccgggatgtagctggcagggcccccacccatttctcccgcctggtgtttcccttatatttgtccggtttttattcctgcaataattaatttctgataaagatcgcatattagtttttgttgttaaaacccccttcttttattccataatatttacttgtcataaatctgaaatactactgaaatattaatgtcatttgcatgtcataaataaagcgcatcttactgatgggaatttgttgccaggctcatgctgtaaaatatatctctggatcagcatgttaacttcgtgtattaattatgatgattttattgcacgggaagcgtagctatgaccacagtggttttgaatgtaaaaattgacgcagagctaaaagaaaagttgcgtcattatgcggaagttaataacgagaacctgggaacggcaacggaaaagctgctgcagttggcttttcagctggaggagtcagcaggtgaggcgggggtgacggaagaggacattgacagccagcataccgaagaggaagcgacgccacttacccctaaagaaatcaaagcattaagaaaacttctgaagaagaaaaaatgaaacaacaattctctacagccagcaactatagcgaagcttgcgatatgttgcgctcaggatacgtaaaacacgtccgcctgaactggaatatcggtagtgatgagttctttcgcattgcttccgactggtgtgacaccggcgctaaaatcaaaaaagatgaagatggctttattatttccctgaaagggtttcctattccgcgccagcattaatgaaattgccttctttctgtcattgggttgccataaccagagggcaggatagccaggcaattttataaaaacatctcatatacctcatggatgaaggtcatttgacgggctgaagtcagcccgtcgctattttcttatattatttttcgcaaacgtgtattttccttctgttcagcaaggctttgccacagcggttgtagcgtggagaaggcccggcgcaatgcttcatccggcagcgtaaacggcagacgtaaatagcgatcgaacgccccttccagcccaaaccgcgtaccggtgccgatatggatcccctggctttccgcacgcgcagagaacagggtggccagcatgtcaggaagttccacccaaaaagagagcccaccttccggtggcgaaaaccgccagcggggaaaatattccgccatcagcgtttcgcacatgtcccggcgcgccttgagcatatcccgccgcggcggcagcagtgtggcggcattttccagtagccagctgcaggccagttgctccagcagcggcgtacccaaatccagcgaatcgcgggcctgaataagcgaggcgatggtccgcgcgctggcgcggatccagccgatacgtagtcccccccagaagcttttcccggccgaaccaatggtgagcaccgcggcatcgggattgaagctggccagcggcgggggcggcggcgcgttataccaaaggtcggccatggtctcgtcgattaccagcgttgttcgcgtcctggcggcgatgtccgcgacccgctggcgggtgggggcatccatacagcgtccggtggggttgtgaaaatccggcatcagccacgccagccgcggcgcagtctgcgcaatagtcgccgccagtccatcgcagtcccatccctgctgcggaagcgaaaccccgacggggcggcaggaggcgccctgaatggcgctgatggccatcggataggttggagcgtcaataaccacccgatcgcccggcccggtgaacaggcgcaggatcagcgcgaaggcgctgagcgcgccgttgaccaccatcacctcatcgggccgcgtcggcagaccgcgttcgctgtagcgccgggcaatcgcctcccgcagcaccggcagcccctgctggtcatagccagtctgtgcgagatagggcggcagcagggtcatagcgtgctggaaggcctgatggacctccggcccggcgctgagggcggcagtagagagattaagcgtagatgagatgccggcaggcagaggaagatcggcggggcgttccggcaaaacaatgcgtgacccgctcccctggcggctgtagagaaagccctcctcccgcaactggccgagggcgctggcgatggtggtccggctgacgttcagggccgccgccagctcgcgctcgccgggcaggcgcgtttgcagcgtcaggcgaccatcaaggatcagcaggcggagcgcttccgccagctggcgccatagcggcgtgcgtgagctggtctcctgccagttgccgagcaggcgtaccagcgattgggttccaaagcgtcgggctgacatagcgatccacttttccaaaactggccattaattatcagtccatttttgctgatgatgagggcattcgcaatgatgttgaggaaaaaatatgcttcgtcgcctgctgcagttatatattggtctggtgctttacggcgtgtccacggcgctcttcgtgcatgccaatctcggcgccgatccgtgggatgttttccatctcggggtggctaaacagctgggtatcagtttcggtacggtgattatcctgaccggcgcggcggtactgctgctgtggatcccgatccggcaaatgccggggctcggcacggtgagcaatgtcatcgtgctgggattagcggcggacgccacgctggccgtcctgccgccgctggagtcgatggtggcgcgcagtgcgctgctggtaggagcgattgtgctgaacgctatcgctaccggaatgtatattggcgcgggctttggccccgggccgcgcgatggcctgatgaccggtctgcatgctcgcactggttggtcactgcgcgttatccggacggcgatcgagctttccgtactgctgattggctggctgctggggggcaaatttggcgtcggaaccgtcatctacgcgctgtcgattgggccgctgatccagctgtgcctaccgtggttcagccagcccgtcagccgcaacgcggtcagccctccccgggaaatagtctcctgaattaacccatcgccctcttcatcatggagagggcctttcatcgcttacaggccgctcaggccatgaagcatcatgtagatccccaccacaataatcagtaagcctgagaaccagggcgccttgcgcgagaggtcgttaagccacggccagcggcgggtggcatgtttaaggctcagagcggcgatggccccggaagccaccagcgtcagcgccagaccaacgctaaagcccagcaccagcgtggcgcccagcgagaatttcttcagctgtaaacagataagcagcacggtaatggacgccgggcaggggatcagccccccggtcaggccaaacagtacgatctgcccggtcgtcacctggcggccatcaaagcgccggttgatctcctgagcatgggcccgctgatgcgcgtcctgccactcctccgacaccagcggcgcggcggatgaggacgcatggtgatggtcatggcggtgatcatggtcatggcggtgatcatggtcatggtggtgatcatgttcatggtggtgctcatgttcatggtggtgctcatggtgcgtgtgaggctgcgattcgcgccaggtgcgccagagcatccagcaggcaatcagcacaacgacaatccctgagaccagctgaaaccagggttcagaggtttgggcgttccagccgcggccaaaccacaggccggccatggcgatcagccagaccaccgccgtatgggaaaccgtggccgccagccccagcagtaccgcctgttttaacgttccccgtaccgccacgataaaggcggccatcatcgtttttgaatggcccggttcgaggccgtgcagcgcgccgagcagtattgcgctgggtataaacagccaggcattgccctgctgcagaagggaagtgaaatcgttcatatcgggatccttgccaaaagtgcgattatcctactcccccccagtagtaaaatactaccccccagtagataaagcggctaataaaaaggatcatggtatgctggcaggcgttgctgaccacgcaggtcggtaatcccggacagaatgaaacggtggatcgtgcaatgtcacatacagttcgacacaaaaagatgttactgacccggctgaagaaaattcaggggcagagtaccgcgttagagaaaatgcttaatcgcgagcatgagtgcgctgaaatattacagcagctggcggcgatccgcggcgcggtcaacggcatgatgctgcaggttattcaggggcatcttaccgaccatgtggtgaaagagcctgacgagacgcagcgcgaagcggatctggagacggtgatgcaggtgattaaatcctatctgaagtagcgccccctgacgttccgctcaagccacccgccgcttaatgcgcatggaggttatgctctgcccacagaatgaactgctcttttggcagcgctttgctgtaaagccacccctgggcgtactgaacgccatgctggcgcagccagtcgcgctggctttcggtttccaccccttcggcgacggtggccagattgagcgctttggccatttcaataatgtgcggcgtcagcggccggtactcgagggtatcgacaaaagatttatcgattttcagcgtgtcgacgtccagtttctgcagatagctcaggctggagtagccggtaccgaaatcgtcaatcgagatccgatggccagcctgacggtagtgagcgatcaccggcatggtggtctccgggtcgacaaacccgcgctcggtgatttcaaggatgatctgttcggcggcgatcccccagtgctgtagctgattgtgcaacaacgtcggcagggtgggcgagcgtaaatcatctaccgacaggttgatggagatgtgcacttccggccgctgccgcagccaggggccgagatcggcaaaaattttcctgacgatatcttccgtcagctgcgtgatgagcccggtctgctcggccaggggaataaagatatccggcgataaaaaagtgccatcgggctgctgccagcgggccagggcctcagccccggcaattttcccgtcctgcaacgaaataatcggctgatagtgaacctgaatcgcttcggaattgagggcgtccagcatgctgttgcgcggtgagcgcaggtgccttagcagacgcagcagcagccaggtggcgagcaggctggtgaaaatgccggcagggagccagaagaacagctgctgtcgaatgtgctgctgcagcggcaaggttgaagaccaggttacgatgccagagcccagctcgggaatgcgctggatccggtagactgtgttatccagagtaagcatatccacatgcggatctttaatgcgttgccagactttcgccggcagcggctgactgctgatcaccattttctggtggtccaggccaaacagcatggtatggatcttctcttcgctggcgggaacgacatcaataaaggagacggggtcgatcatcaccatgtgctgccggctgcccatggccgtcatctgatgatcgaggccaagatcgttaattgaggtcagccaggtgcgatagccgtcgggggcaatgtggtccggcggggggaaggtgaccgcgacgctatggtcttccagggaggagcattgcggcacggaatcacgcagccagagcacttcctgaatgtagcgatgggtataggcgatgcggcggagcgtaagcagatgttcagggctacaggaggcggcggtgtgtgcgtcagcctctcgtaacgcttcccgggcctggtcggcaacctgcagcgtccgaacgacgatacggttggaatagtcatccagttcacgatagaactgcattttggcctgccgcgccgcctgccagatgctgagtgaaatgggcaggatgatggccagtatcagcactcctgtaaacagcgccatcagatgccgggtcctcatgcctgtgtccttatcgttcgccgggtgtcatcagtatatgcgaaagataattcgggcgcagcgggagaaaacgcgtcgtttggggaaaaagccggcatcacaacaggctgcgatgccgggagagaaggatgattccgatgtagcagaataaaaatgagggtgtgaatgccgggcagggtgtgttccggcattcagtcgcagcatacgctgcgcagatgacagcaatatgttagctagtgtgcatccggcgccgggatatcagcgctgatgcgcaggtcgttctcatcaaacaccatgcagaagcgctcatcgaaagccagcttaattttctgccaggggcggaaatggacgtcgccgggcagcagaaccttgacgttgtcgtggccgtagcactggccgaacagataggtattgttgcccagacgctccaccacttcacattgaaactccaccacggtaccggtggtgacttccggggtgaggtgctccggccggatccccagcgtcaccgcagcgccgggcttcagcggctgggtggagatattcagggccagctgatggtcctgcgcgagggtgaccgttaagcgttccggctgccagtcgctgacgatagccggcagaaagttcatcttcggcgagccgataaagccggcgacgaatttgttgaccggattgtagtacagcgccatcggcgaacccatttgttcgactttcccgtagttcatgaccacgattttatcggccagcgtcatcgcctccacctgatcgtgcgtgacatacaccatagtggtcttcagctcctggtgcagacgggcaatatgcaggcgcatatcgacgcgcagctccgcatcaaggttagagagcggctcatcgaacataaacacccggggattacgcacgatcgcccggccaatggccacgcgctgccgctggccgccagagagctgcttcggtttacgatccagcaggtgcgagagctgcagcgttttagccaccatttccacctggcgacggatctccgttttcggcactttattcaccttcagcccgtagcccatgttctctgccaccgtcatgtgcggatagagcgcataggactggaagaccatcgccacgccgcggcgggcgggcacgacatcattcatcacctcatcgccgatcagtacttctccttcgctgacctcttccagcccggcaatcatgcgcagtagcgtcgattttccacaaccggaagggccgacgaagacggcaaactcgccatcttcaatatcgagattgacctggtgcagcgtcaccgtgctgccgaaccttttggtgacattcctcagtcgtatattggacatccacattccccggagtgagtagctgttatttgccgttggcttatcgctatgttgagtgtgatttgtattacgtgtaacaaatcgatgtgacgatgttcaacagcagtaaaatcatgccctgactataacttccgcggattttgcgccatacagggacgtttcatttctgcaaggatgatcacacaactggcagcttatggtagttttatcaacgatcaaagcgtagcgtataacaaaagcgcatcagaacatgttttccacataatacggcagtttgaaaagatttatttttctaactggcagacggaattcaaataaaaaccattaaattgttataccttcacatgaggttgataatgaaaaagaacacgcttgctgcactgatccttaccaccctggcggcggggcaactcgccagcctgcaggcacatgccgccgggcagctcaacgtctgggaggacattaaaaaatccgctggcatcaaaaccgcggttagcgattttgaaaagcagtacaacgtgaaggtcaatctccaggagatgccctacgcccagcaactggaaaaactgcgcctcgacggcccggcgggcattgggccggacgtgctggtgatcccgaatgaccagctcggcggcgccgtggttcagggactactctcgccgctcagcgtcgatcaggcgaaacaggatgcctttacgccagcctccatcaatgccttccgcatggacaacgcgctgtatgggatcccgaaggcggtggaaaccctggtgcttatctacaacaaggacctgatcgacaagccgctggacagcctgcaggcctggctggactactcgaaaacccagcgcgagcagaacaaatacggcctgctcgccaagtttgaccagatctattacagctggggggcgattggcccgatgggcggctatatctttgctaaaaacgacagcggcggctttaacccgcagcaggtgggtctcaatacccccggcgccgtcgaagccgtcaccttcctgaaaaaattctatgccgagaaggtctttccggcggggatcctcggcgataacgggctgaatgccatcgattccctgtttaccgagaaaaaagcggcggcggtgatcaacggcccctgggccttccagccgtatgaagccgctggcattaactatggcgtggcgcccctgccgaccctgccggacggcaagccgatgagctccttcctcggcgtcaaaggctatgtagtatcgacctggagtaaagacaaagcgctggcgcaacagtttatcgagttcatcaaccagccgcagtatgtgaaagcccgctatgtcgccactggcgaaattccgccgctgaaggcgatgattgacgatccggtgattaaaaacgaccaaaaggccagcgccgtcgccatccagtcggcgcgagcggtagcgatgccgggcattcccgagatgggggaagtgtgggggccggccaacgccgcgcttgaactgagcctcaccggtaagcaggcgccgcaggccgcgcttgataacgcggtgaaacagatcacgatgcagatcgaagcgatgcaggccagcaatcagtaattcaccgtcacgtgaagtcaccgagcgggagggggacctcccgtttgtagaaggagtcgagtgtgagcatccattccagcgaaaattttagcgacgcacgcgggcccgggcgccatgcatggtgcggcctgctgctggcaatcgtgccgggtttcggtcagttttatcatcgccagtggctgaaagggctggtcttcctggtgctgctgagcagctttctggggattttttatgatttcctgcgtgaggggttgtgggggttatataccctgggtgaagaggtaccgcgggataactctatcttcctgttagccgaggggattatcagcgtgctgatcgtcgctttcggcgtgctgatctattttctctcgctgcgggatgcgtggctcaacggcaaaaaacgcgatgaggggatcgccctcaacagcgtgcgtaagcagtaccagatgctgctgagcgacggctttccgtacctgatgatcaccccgggctttattctgctggtgtttgtggtgatctttccgattctgttcggtttcgccatcgccttcaccaactacaacctgtaccacaccccgccggcgaagctggtggactgggtggggctgaaaaactttattaatattttcaccctctccatctggcgctccactttcctggatgtgctgcagtggaccgtggtgtggacgctgctggcgaccaccctgcagtgtacggtgggcgtgctgctggcgattctggtcaaccaaaaagatctgcgctttaagccgctgatccgcaccatctttattttgccgtgggcggtgccggggtttgtcaccattctcgtttttgccggcatgttcaacgactccttcggggtcatcaacaacgcgatcctgtccttttttggcatcagtccgaaggcatggctcaccgatccgttctggactaaaacggcgctgatcatgatgcagacctggcttggcttcccgtttgtgtttgccatgaccaccggcgtgttgcaggcgatcccggacgatctgtatgaagcggcgacgatggacggcgccagcgcctttacccgtctgcgcaccatcaccctgccgctggtgctgtatgcgatcgcgccgatcatcatcacccagtacaccttcaactttaataacttcaacatcatttacctgttcaacaacggcggccctgcggtggcaggctctaacgccggcgggacggatattctggtgtcgtggatctataagctgacgatgtcttcgtcgcagtacgccatcgcggcgaccatcacgatcctgctgtcgatctttgtcgtcggcctggcgctgtggcagttccgcgccaccaaatccttcaaaaatgacgacatggcgtaagggaagcaacatggctcaatcacccagtattaaacgcgaaaagtggatccggctctctctcacctggctggtggttattctggtctcagtggtgattatctatccgctggtctggacggtcggggcgtcgctgaacgccggcaatagcctgctcagtacctcaatcattccggaaaatgtgtcgttccagcactatgccgatctgttcaatggcaatgtgaattacctcacctggtactggaactcgatgaaaatcagcttcctgaccatggtgctgaccctgattagcgttagctttaccgcttacgccttctcccgcttccgctttaaagggcggcagaacgggctgatgttgttcctgctgctgcagatgatcccgcagttttccgcgctgattgccatctttgtgctgtcgcaactgcttggcctgataaacagccacctggcgctggtgctgatctacgtcgggggaatgatcccgatgaacacctggctgatgaaagggtatctcgacgcgatccctaaagacctggatgagtccgctcgcatggacggcgccagcagctttcgcatctttatcgagatcatcatgccgttgtcgaggcccatcctcgcggtggtggcgctgttctcgttcactgggccgctgggggatttcatcctctccagcaccatcctgcgcaccccggataaatacacgctgcctatcggtctgtataacctggtggcgcaaaaaatgggtgccagctacaccacctacgcggcgggggcggtgctgatcgccgtaccggtggcgatcctctacctggcgctacaaaaatacttcgtctccggcctgacctcgggcagtactaaaggataagcacatgaaaagattcacacccgcatggcttgcggtttgtctggcatgcagtttctccacctcttctctggccgcggacgcgcttgcaacccgcgcgtttcagggcatgccggcggactttatcaaaggcgcggatatctccacgctgctggacgccgaaaagcacggggcgacgttctacgatcagaataatcagcgcaaggatccgatcgctattctgaaagagaacggcgtcaactatgtccgcctccgtctgtgggtggatccgcaatcggcgagcggcgaggattatggcggtgggaacaatgatctggccaccaccctggcgctggcgaaacgggcgaaagcccaggggatgaagctgttgcttgattttcactacagcgatttctggaccgatcccggcaagcagttcaagccgaaagcctgggaaaagctggattacccgcagctgaaaacggcgattcatgactatacccgcgataccatcgcccgctttaagcaggcgggcgtgctgccggatatggtgcagatcggcaacgaaatcaacggcggcatcctgtggccggaagggaaaagctgggggcagggcggcggagagttcgaccggctggctggcctgctgaacgcggctatcgctggcctgaaggagaacctgcgccagggcgagcaggtgaaaatcatgctgcatctggccgaagggaccaagaacgataccttccgctggtggtttgatgagatcgacaagcgccatgtaccgtatgacgtgattggtctgtcgatgtacacctactggaatggcccgatcagcgccctgaaggccaatatggatgacatcagcaaacgctataacaaagacgtcatcgtcgtcgaggcggcctatgcctataccctggccaactgcgataacgcggaaaatagtttccaggcgaaagaggaaaaggatgggggatatcccgccagcgtacaggggcaatataactatattcacgatttaatgcaggcggtggttgatgtgccagaccagcgtggtaaaggtattttctattgggagcctacatggattgccgtgccgggaaatacctgggccaccccggcggggatgaaatatatccacgacgagtggaaagagggtaatgcacgtgaaaatcaggcgctatttgattgccagggaaaagtattgccgtcggtaaaagtttttaattaatttttttgtcgtctttttcaggaagtttattatgaataaatttgcacctttacatccgaaggttagtacgctgctgcatggcgcggattataatccggagcaatgggagaatgaccccgatattattgataaagacattgccatgatgcagcaggcaaaatgcaatgtgatgtcggtgggaatatttagctgggcgaaactggagccacgcgaaggggtatttaatttcgcctggctggatattatcctcgataaactgtatgccgccggcattcatgtctttctggccacgccgagcggcgcgcgtccggcgtggatgtcgcagcgctatccgcaggttctgcgggtggggcgcgatcgggtgccggccctgcacggcggccgtcacaaccactgtatgtcgtcaccggtctatcgcgagaaaaccctgcaaatcaataccctgctggcagaacgttattcctcacacccggcggtgctgggctggcatatttccaacgaatatggcggtgaatgccattgcgatctctgccagaaccgttttcgcgactggctgaaggcgcgttaccagaccctggagaacctcaaccaggcctggtggagcaccttctggagtcatacctataccgactggtcgcagattgaatcgcctgcgccgcagggcgagatgtcgatccacggtcttaatcttgactggcatcgctttaacaccgctcaggtgactgatttctgccgccatgaaattgctccgctgaaggcggcgaatgcctccctgccggtgactaccaactttatggagtatttctacgattacgactactggcggctggcggaggcgctggatttcatctcctgggacagctatccgatgtggcaccgcgataaagacgaaaccgcgctggcctgttacaccgcgatgtatcacgacatgatgcgcagcctgaagggcggcaaaccgtttgtgctgatggagtccaccccgggcgccaccaactggcagccgaccagcaaactgaagaagccgggaatgcatattctttcctcgctgcaggcggtggcgcatggcgccgactcggtgcagtatttccagtggcggaaaagccgcggttcggttgagaaatttcacggcgcagtggtcgaccacgtcggacatattgatacccgcattggccgcgaagtctgccagctcggcgtgatcctcagcaagctgccggaagtgagaggctgtcgcaccgaggcgaaagtagcgattatcttcgaccagcagaaccgctgggcgctggatgacgcccaggggccgcgtaatcttgggatggaatatgagaagacggtcaacgagcactaccgcccgttctgggagcagggcatcgccgtcgatgtgattgacgccgatgtcgatttaacgccgtatcagttagtgattgccccgatgttatatatggtgcgcgacggctttgccggtcgggcggaggcgtttgtcgccaacggcggccacctggtgaccacctactggaccggtatcgtcaatgagtccgatctctgctatctcggcggcttcccgggcccgctgcgcaatctgctggggatctgggcggaagagatcgactgcctgaatgacggcgagtttaatctggtgcaggggcttgccgggaatcagtgcggtctgcagggcccttatcaggtgcgccatctctgcgaactgatccatatcgagagcgcccaggcgctggccacctaccgggatgatttttatgccggacggccggctgtgacggtgaacgcgttcgggaaaggcaaagcctggcatgtggcctcccgcaacgatttagccttccagcgcgatttctttaccgccctgagcaaggagctggccctgccgcgggcgatagcgacggagttaccacccggcgtggtggcgactgcgcgcaccgacggtgacaacgcatttatcttcctgcagaactacagcgcgcaaaaccataccctgaccctgccgcaagggtattgggattgcctgaccgacgcggcggtatcggctccactgaccctgtcggcatgggattgccgtattctccgtcgtcacgcgtaatttcttcttctccacgcctgctctgacgagcaggcttttttttatcttaaacctggagtttattatggtgagtttaaaatccttcctgcactatttctccccagcgcgtccggcacagccattaagcgaggcggaaaaacagcaaatcgaggcgctgattcaggcctttggtggcgaagcgaatattacgcaagtggacgcctgtattacccgtctgcgggttagcgttcgccatcttgcggccgtggactccgaagcattacagcagcagggcgcgctgggggttattattcttggtcagcaggtgcatgctattttcggtaagcagtccgatgcgctgcgtcagcttctggatgaacattttgccgcccggaaataaataaaacgggataacctgaaagcaggttatcccgaaaataagacaaagacagcagtggcaataaagtttaccggaagataattaacagtcttacagcaggagataaaaataacgtatgagtcttagccgtgcgcaattaccaccaggcctcaacctgcacgccgaaattccaggtattattcgccgtctggtcttcaaacggtttaccatcttcggaatcattcaaatatgaagcaaaaatgcgtaattccggacgtgacataaagtctggcccgtccgccaggcccaacgcaatggtgtatttctcaccggcctgtttgtagctggtgccattgttgtagctgtctttctgatagaaaccgccgacttcgccaatcaggcgcacgtagtcggtgaactggtactgcccgcgggcgaccagcgacagcatccgcgttttgtcggtatagtcggtaatgtcatccgccgagccccaggtcagaacgtggttgatagaaaacttctcagtaatcgggatcaggccggtgttaatcacgcgataaccggtggcgtcgttcacgtagttccacatatcgtaccagccgccgccctgggagaccatgttctgcgccaggcctttgttggcgtactgcagcacggttttgttatagccgcccagcatatcctgactgatttcaccggtcagcatgacgccgttgtcagcatcgtacagtccgccgtagctatcctgttttttggtggtgtttggcatcgcgtagtcgataccgaattcggtccacgagcccgcccatggcttccagcccgcgtagcgtaaatcgatatagttgatattgacgttgctgtcgccatcgacgcgatagtcaacatcgttggcatcgccgcggatccaggccagcgagacggcgcccgggccgagggtgtagttttccaccccggctccggagccggaaatgttccagtatttggtatcgatgatatgcagatcatggcgctggtagtaacgtttaccgccccagatcaccgcattcggatcgccagggatcagcccctttatctgcaggttcaactgacgtaagccgaactgtgcatcatcgttcagcgtggtttcattatcgttagagccgtcggagaccatgctgaccatactgtcgagatagaagctgacgtcatctttcttatagacctcagagcccagctccagctcgccgtaggtatccgactcgttccccaaacggcccagcttatttttttgccattccgcttcgctaccgtcgccggagaccccaaccccggcgcgcatatagccatggaaatcgatcgttgggatcgcggcggtggccgcaaacgcggaaggagcgattagcgcagcggctaacgcgactgaaagggcgcgcagtgtagtgttcatctctatcctctcattgttttgtattacgttcacataactggtgtcataaaatgcctaaatgtaacttcaggcaaatgagatatgattattgtgtgactaactgcaaataataacggtgttttttgttgcgatgggtgagatgattcacaattcgctgtattgtgaacgtaatacttttatcgctattgttttgcagtgagaggtggtggtgagcgttttttcaaatggcccctgttacaatcatgggataacaacataaggaaccggaccatgaagtctaaaagcgctactctggaagacgtcgcacgccatgcgggcgtctcttaccagaccgtgtccagggtactcaacaaatcagctaatgtatccgaagcgacgcgtcgcaaggtggagaaatcgatagaggccttacgctatgtgccaaaccggctggcgcagcagctggtggggaaggagagccagacggtcgggctggtgactatttctctggcctggcatgcgccttcccaggtggcggcggcggtaaaacgctatgccaatctggaaggttaccaggttctgatttcgatgatcgatgagagcgtcaaccaaagtatccaggattccatcaatgagctgaaatctcagcgggtggataaagtcattatcaacgtgccgctggagaccgaacaggcgcagaaaatcgctgctgacaacgatgatatcgtctgcctgtttctcgacgttgatccctacagctccgtgtttaacgtttcgtttaacccggcggacggcacccgggccagcgtcaaatatctctatgagatggggcatcgggagatcgccctgctggcggggccggacagctcagtctcggccaaactccggttaaaaagctggctggagaccctggatggttacggtctgaagccggtgaccgtcctgcacggcaactgggatgcgcagagcggctacgccggcgcgctgcagatgctgcgcgaaacgcctaatttcagcgctgtgctggtgggtaatgatcagatggcgctgggggtgctcagcgccttccatcagcatcaggtggcggtgccgggtgagaagtcggttattggctatgacgatacttacgaaagctcctttttctatccggcgctgagtaccgtgtcgctcgacctcgacctgcaggggaaagaggcggtgcggcggatcctcgccagcaccagcggggcgcctcatacctcatccattctgccggcgcgcctggtgatacgccattccagcggcgcccgaatcgagcagggaaaagatctgcaggccattgcggaacagctccgcgccatcgcccaccgtctggcaccctgacgccaaaggcggggaaactcgccttatcaccttacccttaaattgagcagggttgatctttgtcacagcacggcgtaaccttattgttatgttataacgtaataaagaggtcatcatgaaagcccatatccatcctccctatcgtacggtggtgtttcacgacaccagcgcgaatgagtattttaaagtcggctcaactatccgcaccgatcgcgtgattgaactcgatggcgaaacttttccgtatgtgacgatcgacgtctcctcgaaatcgcatccgtactacacgggcaaacaaaaaaccttcgctaatgaaggcagtgcagcccgattccgccagcgcttcggcggctttattgatgcgaaaaggaaagcatgatgcaggtcgtcaactcattacgtagcgctaaacagcgccacccggattgccagctggttaaacgcaaagggcggctgtacgttatctgtaagagcaacccccgcttcaaagcggtgcaggggcgcaaaaaacgccgttaacggaaactctccagcgagcggcgctgttggccgtcggcggtaaaattgtcggcggccagccattggcgcatggcgttatccagctccggccattcgccgtctatcaccgaaaaccagtccgtgtcccggttgtgtcctttactcaccagcgcctggcgaaaacgtccttcgtactgaaaccccagccgccttgccgcccgggctgatgggatattaagactgttgcatttccattcatagcgacggtagccgagcgtatcaaagacatactgcatcaacagccagtgcgcttcggtggccatggccgttcggctcagtaacggtgaaaaatgcacatgccccacctctaccacaccgtgagcgatatcgatacgcattaacgccagcgagccgaccgctttccctcgctgctggtcaacgacggcaaaatgaatcgggtctgccagcgtggcgacctgctccacccaggcactgaattctgcaaggttgctctcaggttcacgcagcagccacgtccagctgcgggcgtctggcgccagctggtgagcggcgaacagatcgctggcatgagcaagagtcagcggttcgagtcgacaacggctgccctgtaatacctgtcgtgtcggccaggggcgcggctgccagtcaggcagcgcgacgccgagcgcctggccaaactgattatattcgcacattgcggtttccttattggagatttacaggcagcgtacgcgctcgctggttccataaaaagtgccattagagtatgtttttatggggccacgaggaggcaatatgaatataccggacgaggggttttttacgctgttgacgcaggggatgcggaaccgcacggtcgaaaccttacagcgcgccctttaccacaccttacgtgacgctatcctgcagggaaccctgacggcccgctgccgtttacccggatcgcgggtgatggccgaacggctacacctgtcgcggaatacggtcaatgccgcactggaacagctggcgctggaggggtacctgacacggagccgtcagggaacgcaggtggcaccactcgcctcctgccgccaggaggcgggtcagatgccgcccgtcgtgctgcctgagcggctgcaaaggctgccagccgcgatgcgccgcgactcaccgacgctggcatttacgccaggcatgccggcggtaaactatttcccgctgccgctgtggcggcgactgatggataacgtgctacgcgaagatggtagcgcgctgctgggttatggcgaagccgcgggcgatcctttgctgcgagaggctatcgctcgtcatctggcgctctcccggggcatccggtgcgatatccggcagatcgtcatcaccgaaggcgcgctggaaggcgtcaacttatgcgcctcgctactgaccaacccgggcgacagcgtgtggctggaagaaccggggtacctgggggcgtggagtggctttcagcgggcgggactgcgggtcagaggaatggctgtcgacgatgaagggatgtgtattgccaacggcgtcgcggagccgccccggctcattttcacctctccttcacaccagtatccctgtgggagcatcatgagcgccgggcgccgtctggcgctcgtggaatatgcccgccggcacggggcgtggattgtggaggatgactacgacagcgagtttcgccatagcggagaaccgatcccggcgatgctgggaatggtgcctgatgccccggtggtctatctcggcaccttcagcaaaacgctgtttccggcgttgcgtatcggttttatggttatgccgcccgcgctggcggatgctgctcaggacgccattggcgcgctgctgcgcgggggacaccgtgctgaacagcgggcgctggccagctttatcgagaagggacactatgcgcgccatctggcggcgatgcgccgcctgtaccgtaaacgtcagcaacagctgcgcgaggcgctggcgcaagagataaccgtgccgtgcgacgttctcggcgggggaggggggatgcacctgacggtggcgatggagggcgttaatgaccggacgcttgcgcagcaggcgcgccagtttcagctggcgcccgccgcgttaagtcatttctatctcgacccgcagcgagcgcggagcggactggtgcttgggtatggcaatacctctgcttctcgctatctcccggcgctgcggaccctaaatcgccttattgcgcagcaccggcgcgcgtgagggtaaagacatcgtagaaggagagctcgcctttggtggcgaccatctttttgagctgcgccttctgctcgctatcgacgtctggcgactgcaggatacggtcgatcagctgccgggggacaaagcgggtgttgtaccattccccgttgtagcacacgcgaaagtcgaggacatcgatatcctcgtagcgatagcgtggatagacgtcaaagaagaaaaaggcgttgaacagaatgaacagcaccaccagcaaccagaccgagtctaccagcgtttcagagcgcagcatgaccaccagcgtcgccagaaacgcggcatacatggcaacaaacagtcccggatggttgcggataaaactgatgctaaaacgcgggcgattatcgcgtttttcctggacgttgagttcgtcaatggtgtgaatcagcaggcgttgtatttctgtcatcttggtcctcgaattatgcaatgagcctgccgcgcccggcggaccaggcgcggcaggctcagcctgaaggctattttatgttgcaatattctgcggagaaagtaacagatcagttacagaaaagcataacagttacggatttgtcggcggaaggcgcttaatgatctgcgccgggttaccgccgacgacggtacaggcaggtacgtctttggtgactaccgcgccggacgcaatgaccgcattatcgccaatggtcacgccgggattgatcactgcccgacccccaatccacacattgtggccaatagttaccggcttgccgtattcctggccgctattacgcgcatcggcgtccagcggatgagtggcggtataaatatggacgcctggcgccagcatacagttatcgccaatatggatagggcagacgtcgagcatcacgcagtcaaaattggcgtaaaaaccggcgccgagaaaaatattataaccatagtcgcagcgaaagcttggctcgatatacgcatcgccggcgcgagcgaacagctcggccagaatatgctgacgttgttcctggtcatccggggcggaatgattataacggtgcaacaactgtctggcgcgcaggcgatcggcgcgaagcgttgggtcgccagataaatagagctcaccggcgatcattttgcgtttttcttcactcatgggtcttccttatacctgactgttgatggccgtagcagtataaaaaagaaaccggttacagggttgctgttggctgaatgatgtgatgtctatcacaaagataccctatggcggctgacccgtaccgtccggccagcagaccacgtagtacgcgtaaattagcggataaatttccagacagaagtcgggattttatcgtatagcttattcatggtcagttccgccagacgatggtcggcagctgagtaaaataccgccagctcattatcagacagttcatatttatttttttcaatgacgcgctccagcgtgtcaattgtctggcaacgacgtaagcgcatcaaatagtctgttttagttaatggcttatcagacataattccaccttttgattgtaataattctaacacgatagactggccgggttttcccggctggcgttgacaaagcaacgaaatagtcggttaccggattttttccacttttgcaaatccgtagagttaatgccgtagttactgaacaacgtaaaagtgtcgtccagatattcgtcaacctgagcgatcagcttattatcctctgcatacttaattttataattaagagcgaatgtggcaatgtgctcgatcaattcatttaactggagattgacagccgacgtcgggtcgttgacccagccatggttgctctcttccaggtttgcaaggcagtcatgatacagcgtttcgcagagaaagcgtagctgtgcaatatcatgtctttttggcgagtattcgtccataacgcatccccttttgagtggtttaaacgacgactagcaaacaccgttgtgggatgaacacgactaactgacctgacactaactgagtaatcctgctgatttaactataatccactctccaacagatttcatcgtgctattacgaaaaattacaattatcagcgagaaattatcttaaaaatagacgaattaatttcgcaggcgctggcccacagccggagaaatagagaaatcttatgaatcattggtttaaggcaggcagctgtcgcgttcagaaaccgccgacccgtggataatgatagtaagattattcctggtaaatgagtgtttgccgatcccgagttgttgaacaagctgctaaaaatagcctgcgccatatcaatatatattaaatgcagaacgaaaaataaacaatggcaatatgtgccttgccagccagtgataaaaaagggccgcggtagcggccctttgttcaggagtgaagattaatgatgctcaacctgatggctgtgctctatatcttccgattttttgctaaagcggcgacgaaccaccacaaagaacaccggcacgaagaagatcgccaggatcgtcgcggtcaccatcccgcccattacgcctgtaccgacggcgttctgcgcaccggagccggcgccggagctgataactagcggcattaccccgaggatgaacgccagagatgtcatcaggattggacgtagacgcatacgtactgcttcaagcgtcgcctcaatcagccctttgccctctttctccatcaggtctttggcgaattcaacgatcaatattgcgttcttcgccgacaggccgatggtggtcagcagacccacctggaagtaaacgtcgttggttagcccgcggaaggtggcggctaacagcgcaccgaccacacccagggggacgaccagcataaccgagaacggaatcgaccagctctcatacagcgccgccagacacaggaagacgacaatcagcgagatggcatacagggcaggggcctggttgccggacagtcgctcctgataagacatcccggtccagtcgtagccgataccggaaggcagtttacccgccagctcttccatcagcgccatcgcctcaccggtactcttgcctggcgcggcctgaccgaggatttccagtgacggcagaccgttgtagcgttccagacgcggcgaaccgtattcccaacgcgaggtcgagaaagcagagaacggcaccatctgaccatcgctgccgcgaacataccacttgccgatatcttccggcagcatacggtatttcgcttcggacatgatgtacactttcttcacgcggccgcggtcgataaagtcgttgacatagcttccgccccaggctgcgcccagcgtggtgttaatgtcgctgatggagacgcccagcgcctgagctttctcctgatcgatatcgattttaaactgcggtgtatcttccagaccgttagggcgcacgccggtcagcacgtcaggatgctgcgccaccatgccaaacagttggttacgcgcctgggtcagtttttcgtggcccagaccgccctggtcaatcagctcgaagtcaaagccggtcgcggtacccagttcaacgatagccggcaggttaaaggcgaagaccatcgcatctttaatctgcgagaagtagcccattgctctcgcggtgatcgcttcaactttgttttcctcacccggacgctggctccagtctttcagcgaaacgaacgcgataccggtgttctggccgcggccggcgaaaccgaagccgttaaccgcaaacacggattccacgttgtccttctctttggtgagatagtaattcgtcatctcatccagcactttctgcgtacgctcctgggtggcgccggcaggcagctgcgccatactcaggaatacaccctggtcctcgtccggcaggaacgagctcggtagacggacgaacagccatgccatacccaccacgatgatcagatacagcaccagataacgaccggtgctgcgcagaatgttgcctacgctgtcggtgtaatggtgcgtgctcttatcaaacatgcggttaaaccagccgaagaagccggtggtcgcgccatggctgcctttctgaatgggtttcagcatcgtggcgcacagcgccggcgtcaggattaacgccaccagtaccgacagcgccatcgcggaaacgatagtgatggagaactggcgatagatggccccggttgagccgccgaagaacgccatcgggataaataccgccgacagcaccatagcgatacctaccagcgcgccctgaatctgtcccatcgatttacgcgtcgcttctttcggcggcagaccctcttccgccatcacgcgctcgacgttctctaccaccacgatggcgtcatccaccaacaggccgatggcgagcaccatcccgaacatcgtcagggtgtttatcgagaagccaaacgccgccagcaccgcgaaggtgcctaacaggaccaccggtaccgcgatggtggggatcagggtggcgcggaagttctgcaggaacagatacatgaccaggaacaccaggatgatcgcttccaccagcgttttaaccacttcgtgaatagaaattttcacgaacggggtggtgtcatacgggtaaacgatcttcatccccgacgggaaaaacggctccatcttcgccagttcagcgcgaatagcgttggcggtatccagcgcgttcgcgccggtagccagtttaatacccagaccggatgccggctggccgttaaacttcgccactacgtcatagctttcgccgcccagctcaattttggcgacatcacgcagacgaacctgggaaccgtcctggttcaccttcagcaggatgttgccaaactcttccgtattggtcagacgcgtctgcgcgatgatcgaggcgttaagctgctggcctttcaccggcggcgtaccgcctaactggcccgcggccacctgggcgttctgcgctttcagggcgctgatcacatccaccggcgtaagctggaagttgttcagtttgtttggatccatccagatacgcatcgcatactgggaaccgaatagctgaacgtcgccgacgccgctggtacggctaatcggatccttcatgttggccgccacgtagtccgaaatatcgtcctggttcatggtgccgttggtgttaatgacgccgacaaccatcaggaagctgctggacgctttctcaacgctaatcccttgctgctgtacttcttgcggcagcagaggcgtcgccagcgccagcttgttctgaacctgaacctgggcgatatccggatcggtaccggattcgaaggtcagcgtaatggttgccgtaccggtggagtcgccatttgaggacatgtacatcaggtgatcgataccgttcatattctgttcgataacctgagttacggtgttctgcaccgtttcggcgtcagcaccggggtacatggcggtaatggaaattgctggcggcgcaatcgtcggatattgcgccaccggcaatttgaggatcgataatcccccagccagcatgatgataatggcgatcacccatgcaaatatggggcgatcgataaagaaattaggcatgtcttaacggctcctgtttaagttaagacttggtttgttctgatggcgcgttgcctgcggcttgctgtttatcatcagaagctacttcctgcgcttttacctgcacacctggtttgattttttgcaggccggtgacgataacgcgatcgccggatttcagaccgtcagtgaccagccatttatcgccgatcgcctgagaagcagtgacctggcggacttcgactttatcgccttcccccactaccatgacgctggcgtcgccgcgtggcgtacgggtaacaccctgttgcggtaccagcagggcgtcagggttaatcccttcttccagacgggcacggacgaacatccccggtagcagggtgtgatccgggttcgggaaaatagcgcgtagcgtgattgagccggtggtctgatcgacggtgacatccgagaattccagcgtgccggactgtggatacttaagaccgtcattagtcaccagctccactttcgctttgccgttttcctgtttcaggcggccgtcggctagctcctgcttcaggcgcaggaaatcattgctcgactgggtgacgtcaacatagatcggatccagctgctgaacggttgccagggcggtcgtttgaccattctgtaccagcgccccttcggtcacggcggatttaccgatccggccgctgatcggcgaggtgactttggtataggccagattgatgcgcgcggtttcaacggcagctttcgccgcgaccacggccgcattgctctgctgcgccgttgcaacggcggtatcgtagtcttgttgactaatatatttggtgcccaacagtttctgataacgtttgaccgtcagttgatccatgtttgccgccgcctgggcttttgccaggtcgcctttggcgctgtcatagctggcctgataggtggctggatcgatctgatacagggagacgccggcctggatatcgctaccttccacgaagttacgttttaaaataatgccactgacctgaggacggacttccgcaatgcgataggcgctggtgcggcctggcagttcggtggttatttgtagaggtgcggatttgagcgtcacaataccgacttccggcatgtgctgggctccctgttgagccggtttatcgtcacatcctgttagcgctaagctgcctgagagcatcagaacgaccgccagaggcgttaaccctctgtttttgttcatatgtaaacctcgagtgtccaatttcaaaatgttcagtggctcaaacaaccacaaacccactacagtctttctattatggtcatgctatggtacatacattcacaaatgtatgtaaacgtaacctctgtaaagtcattaacctatggcacgaaaaaccaaacaacaggcacgtgaaacccggcaactgattctggatgttgctctgcgtctgttttcgcagcaaggcgtatcatctacctcgttggcaacaattgcaaaagctgcgggtgtaacgaggggggctatctactggcatttcaagaataaatcagatttattcaacgaaatttgggagctgtcagacgccagtattagcgatctcgaaattgagtatcgggcaaaattccccaacgatccactctcagttatcagggagattctagtctatgttcttgaagcgacagtgacagaagaacgtcgacgattaatgatggagattatctatcataagtgtgagttcgtcggtgaaatgaccgtggtgcagcaggcccagcggcagctctccctggcgagttatgagcgtatcgagcagaccttgaaagagtgcatcgcggcgaagctgctgcccgccaatttactcacccggcgggcggccgtgttaatgcgcagctacctttccgggctgatggaaaactggctgtttgcccccgattcgttcgacctgcatgcggaagcgcgggactacgtcgctattctgctggagatgtatcaattctgcccgacgctacgcggcccggagagcttgtcagcttaaaggtagcgcgcggatgggcgtgaatttttagcgccgtccgccgctattcgccagcgctgagaagtgctattctgcgcgcttgcgacgacccccggtattctccggcatttgcattcattcatattaactatgctgcacacgatctccaggcaacgcgccacgttcatctttattatcacgctgctctgttttattggccttttcagcccagtccagggccgcgccgcggatctccccgatcgggcagaggtgcagagccagctcaatacgttaaacaagcaaaaagaactgactccgcaggacaaactggtccagcaggatctgactcagacgctggaaacgctggataaaatcgagcgtatcaaaagcgagacggcacagctgcgacagcaggtcgagcaggcgccggcgaagctgcgccaggcggtggagagcctcaataacctgagcgatgtcccgaacgacgacgcgacgcgcaaaacgctaagtacgctctccctgcgtcagctggagtcgcgcgtcacccagacgctggacgatctgcagaatgcgcaaaacgatctggcgacctataacagccaactggtttccctgcaaacgcagccggaacgcgtgcaaaatgcgatgttcaacgcctcccagcagctgcagcagatccgcaatcgtctgaatggcacctcggtgggcgacgagaccctacgcccgacccagcaggtgctgttgcaggctcaacaggcattgctcaacgcgcagatcgagcaacagcgcaagagcctcgaaggcaacactatcctgcaggataccctgcagaagcagcgtgactacgtcaccgcctggagcaaccggctagagcatcagctacagctgctgcaggaggccgtgaacagcaaacggctgaccctgaccgagaaaaccgcccaggaggcggttacccccgacgaaacggcgcgtattcaggccaacccgctggtcaagcaggagctggatattaaccatcagctcagcgagaagctgatccaggcaacagagaacggtaaccagctggtgcagcgcaatatccaggtcaaaaactggctcgaccgcgcgctgcagtctgaacgggatattaaagagcaaatttcagttctgcgggggagcctgctgctgtcgcgtattctttaccaacagcaacagacattaccgtcggcggatgagctgcaggatatgaccaaccgcatcgccgacctgcggcttgaacagtttgaggtgaaccagcagcgcgacgcgctgttccagagcgatgcctttgtcgccaaactggaggaggggcacagcagcgaagtgaacgatgaagtccacgccgcgctactggaagtgatcgacatgcgtcgcgaactgcttgatcagttcaacaaacagttgggcaaccagctgatgatggccatcaacctgcagatcaaccagcagcagctgatgagcgtctcgagcagtctgaaggaaattctgacccagcaaattttctgggtgaacagcaataaaccgatggactgggagtggattaaggccttcccggaggcgctgaaaggtcagtttaaggcgatgaaaatcaccgtgaactgggaaaaagcgtggcctgcggtgtttgtcgctttcctggccggtttaccgctgctgttgattgccggcctcatccgctggcgtctgcagtggctcaaggattatcaggcaaagcttgcttcccaggtgggacagctgcgcaacgatacccaactgcatacgccgaaggcgatcctgatcgatctgatccgcgccttaccggtggtgctgttgattctggctatcggtctgatcttactcaccatgcagttaaatattagcggactgctgtgggcatacagtaaaaagctggctatgttctggctggtgtttggcctgtgctggaaagtgctggaaaagaacggcgtcgcggtcaaccactttaatatgccggcgcagttgaccagccactggcggcggcagattgttcgcgtcagcctggcgctgctgccgctgaatttctggtcggtgatttccgaactgtcgccgctgaacctgatggacgacgtgctggggcagttggtgattttcttcaacttactgctgatcgcggtgctggtttggccgatgtgccgggaaagctggcgcgataaagagtcgcacagcctgcgcctgctgacgatcacggtgttgtctatcgttccggtggccctgatggtgctgacggcaaccggctacttctacacgacgctgcgtctggcgggacgctggatcgagaccgtgtatctggtgatgatctggaacctgctgtaccagaccgtgctgcgcggcctgagcgtggcggcgcggcgtatcgcctggcgccgcgcgctggcgcgccgtcaacatctggtgaaggaaggggcggaaggcgccgagccgcaggaagagccaactatcgctctcgagcaggtcaaccagcagacgctgcgcatcaccatgttggtgatggtcgcgctgttcgcggtgatgttctgggcgatttggtctgatttgatcaccgttttcgcctacctcgacagcattaccctctggcactacaacggtaccgaggcgggggccagcgtggtacgcagcgtgacgatgggcagtttgttgttcgccattgtggcgtcaatggtcgcctgggcgctgatccgcaacctgccgggtttgctggaggtgctggtgctgtcgcggctcaacatgcgtcaggggacctcctacgccatcaccaccattctcaactatgcgattatcgctatcggggcgatgacggtattcggggcgctgggcgtctcctgggataaactgcaatggctggcggccgcgctgtcggttggtttaggttttggtctgcaggagatcttcggtaactttgtctccggcctaatcattctgttcgaacgtccggtgcgcattggggatacggtcactatcggaaccttctcggggacggtaagcaaaatccgtattcgcgccaccaccatcaccgacttcgatcgcaaagaggtgattatcccgaacaaggcgttcgttaccgagcgcttgatcaactggtcgctctccgacaccgtgacccgggtggtgatccgcctcggcgtcgcctatggctcagacctggataaggtgaaagaggtgctgctgaaggccgcgcacgatcatccgaaagtgatgcaggagccggcgccagcggttttcttcaccaccttcggggccagtaccctggatcatgaactgcgtctgtatgttcgagaactgcgcgatcgcagctacacggtggatgagctcaaccgcgccatcgaccgcctgtgccgggagaatgacatcaacattgcctttaaccagctggaagttcatctgcgcaatgaaaaaggcgatgaagtcaccgaagtgaaacgggacgggaaaggcgacgatctggcgcccaccaccgcgtcctgatcgaagaggggcggcgcaaagccgcccctgctgtatcagggcgccagcgcggcgagttcttcatcgctcagcccggtgagctcctgcacggtttgacgttcgaggccgcgcgccagcattctggcggcgatgctgcgagtggcggcttctcgaccttcctgctcaccctcttgctttccctgtttacggcctttctcttccagccattcggcaatggtcatcatcagctccttatgcctgggcgactgcgccgccagcgtgcggatcagcgcccccggatgttccgtggttcccgcctgcaacatatagcgcagcagcgtattcagctgcgcttctgtcagatagccttgcgtcatcagcgcaatcagcggcacctgcagctcggccagatcgcgatggcggatatgcttttgcagcagctccagcatggccatccgccgatgacgggcgatctgattatctggcattacggtgaggtccaccagcggaaaatcattgctatagagcgccttcgccagcgccggatcggcgaatagctgttgccagttgcgggcccagggccaggggctcactttgccgtgataaaacagaatcggcaccaccagcggcagcgtgtcgtggccggcgtccagatgacgctgcatggcggccagcgcatagcgcagcaggcgaaacgccatcagcttgtccggggtactctggtgctcaatcagcgcgtacacatagcccggtccatgacgcgtgcgcagtgagtaaaggatatcggaatagctggcgcgcaggtcctcttcaacaaagctaccggagaccagctgcagcgaatccagttcgcagatcgccagaaacggcgcggggaggtacaactgcaaaaaatccttcgcgaccgcctgatgcatgagcatctggcgaaacaccgcgtcgtgtggggtttgactgactttttccatcaatattgtctccagtggcgtcatgcgcagaggaccagactgccagcacactgccggagacaacatcctacttctctgggttttgcgacccgctttccgcgttttttaacttgtttgcataatcccgccggacaatttccagcgcgctcagcacggtttgcgccgggatctgatgcgattccagcaacatgattaaatcgacggccagtttgacctcatcggatgcattttccagcgacatcgggctctcctgttagcgcgtcagccgcgccagtacgttttcaatcttgtccagcgcctgtcggcagcgcgccaaccggccgctgtaggcttcaacttctttccccagccgctgctgctcgtcaaggctggtcgcctgcgccagctgacgctggcgttggtcgcgcatcgccagcaggcggcgctcatactcctgatgctgcaggcgacggcgctgccagcggctcaacgttggcgacgcgtggtcccaactgcgcaaggaccaggtggcggtttcacggcgcagcgcggcgatttgtgccgccagacgctcggcaatccagaccacctgcggcagctgctggcgctcgacggcctggcggagctggttaaagttgtgttgggcttccgccagataggcctgcatcagcgtgctgcgggtgtggaagagctgacggtcaaagcgcgggctgagggtcgcgtgctccgccagcggcgccaccagcgcggccagctcgctgagctgatcgttcagcgtttgtaaaagttgagctgttttcaccacacctctccattcccttccagccaactgtgctacagtagcctcatctgtttgataacgattcgcattatgccacctgttattttaaccattatcggctggctggcggtagcgctgggtacgctgggcgtcttcttaccgttgctgccgacgacgccgtttattctgctcgccgcctggtgctttgcccgctcatcgccgcgctttcaccagtggctgctgtatcgctcctggtttggcggctatcttcgccactggcaacagtaccgcgccatgcctcgcggcgccaaaccgcgcgccattgcgatgatcgtagtgacttttgctatttcgctatggctggttaagcttacgtgggtgcgcatcatgctgttggtcattctggcctgtctgctgatctttatgtggcgcattccggtggttgacgcaaagcaacaaaagcactgatgcgcaataatgcctgttgcaattgttgccgacagccagtaaattctggcgttttcgagcgcgggcaagcctggtcaaaggttaaacaaatgtttctttggccccttttgcacgcccgtgggtaataccgtttcaatcaggcatacacttatgaccgcaactgcacagcagcttgaatatctgaagaacagcatccagagtatcgaggattatccaaaacctggcattcttttccgcgatgtcaccagcttactggaagacccgaaggcctacgcgcttagcattgaactgctgaccgagcgctacaaagacgcgggtattaccaaagtggtagggactgaggcgcgtggcttcctgttcggcgcaccggttgcgctggcgctgggcgtgggctttgttccggtacgcaagccgcgtaagttgccgcgtgaaaccattgccgagacctatgagctggagtatggcaccgatcagctggagatccacgttgacgccattaaaccgggcgataaagtgctggtggttgacgatctgctggcgaccggcggcactatcgacgccacggtcaaactgatccgccgcctcggtggcgaagtgcacgatgccgctttcattatcaatctcttcgatctgggcggcgaacagcgcctggagaagctggggatccactgctacagtctggtgccgttcccgggccactaagcaaatccctccacatagcctcgccgatcgggcggggctgtgatagcatgaccccttcgtgatttcaccttccagcgtttcagagccagcccatgagttatcaggtcttagcccgtaaatggcgcccacaaacctttgctgacgtcgtcggccaggaacatgtgctgaccgcactggcgaacggcttgtcgttagggcgcattcatcacgcttatcttttttccggtacccgcggggtcgggaagacctccatcgcccgtctgctggcgaaagggttaaactgtgaaaccggcatcaccgccaccccctgcggcgtgtgcgataactgccgggaaattgaacaggggcgctttgtcgatctgattgagattgacgccgcctcgcgaaccaaagtcgaagatacccgcgatctgctggacaacgtccagtacgcgccggcccgcggccgctttaaggtctatctcatcgacgaagtccatatgctgtcgcgtcacagcttcaacgcgttgttaaaaacgctggaggagccgccggcgcacgtcaaattcctgctggcgacgacggatccgcagaagttgccggtaacgatcttatcccgctgcctgcagttccacctgaaggcgctggacgttgaacagatccgccatcagctggagcatattcttggcgaagagcagattgcctttgagccccgcgcgctgcagctgttgtcgcgggcggccgatggcagcctgcgcgatgccttaagcctgaccgatcaggcgattgccagtggggaagggcagctgacggccgcatcggtgagcaccatgctcggcacccttgatgacgatcaggcgctgtcgctgattgaagcgctggttgctgccgacggcgagcgggtcatggcgggcgtcaatgacgccgccgcacgcggcgtcgagtgggaggcgctgctggtcgagatgcagagcctgctgcaccgcatcgccatggttcagctgtcgccttcggcgctgggcgccgacatggccgcggtcgaagtgcggatgcgcgaactggcgcgaaccgtaccgcccggcgacgttcagctctactaccaaacgctgctgattggccgcaaagagctgccttacgccccggaccggcggatgggcgtcgaaatgacgctgctgcgtgccctggcgtttcatccgcgtaagccgctgccggagccggaggtgcagccggcacaggccgccgcgcccgcgccgcgtcagccggttgcccccgccgcgccgccgccacagtcgccgcagagtttgccgccgaccaccagccaggtgctggcggcccgcagccacctgcagcgcagtcagggagcaaccaccccaaaaaagagtgaaccggcagccgcttcccgcgcgcggccggtgaataacgctgcgctggagcgactgagttcgattaccgagcgcgtccaggctcgtccggccgcggccgcgctggagcaggccccggcgaagaaagaggcctatcgctggaaggcgacgacggtggtggaagagaccaaagtcgaagtcgccacgcccaaagcgctgaaaaaggcgctggagcatgagaagacgccggagctggcggccaagctcgccgaagaagcggtcgagcgcgacagctgggcggcggaagtgagccagctggcggtaccgaagctggtcgagcaggtggcgctcaacgcgtggaaagagcaggagggcagccgcgtctgtctgcatctgcgtcccagccagcgccacctcaattccgccagcgcgcagcaaaagctggctgaagcgctgggggtgttgtacggtacgccggttgaattgaccatcgtggaagacgataatcccgcgatgcgtacgccgctggagtggcggcaggctatttatgaagagaagctcgcgcaggcgcgcgaagccattatcgcggataataacattcagaccctgcgtcgtttcttcgacgccgatctggatgaagagagtattcgccccatttgaatgccagtctgactggcattcagtacctttaacgatgactgactgagagagaagcctatgtttggtggaaaaggcggcctgggtaacctgatgaagcaggcccagcagatgcaagagaaaatgcagaagatgcaggaagagatcgctcagctggaagtaaccggcgaatccggcgcgggtctggtgaaagtgaccattaacggcgcgcacaactgccgccgtgtggagatcgacccaagcctgctggaagacgacaaagagatgctcgaagacctggtggctgccgcgttcaacgacgccgcgcgccgtatcgaagagacccagaaagagaagatggcttccgtttctgccggtatgcaactgccgccaggcttcaagatgccgttctgatgcaaactagcccgctgttaactcagcttatggaagcgctgcgctgtctgccgggcgtcggcccgaagtcagcgcagcgcatggcgtttaccctactgcagcgcgatcgcagcggcgggatgcgcctggcgcaggcgctgacgcgtgcgatgtcggagatcggccactgcgccgattgccgcaccttcaccgagcaggaggtgtgcaatatctgcagcaacccgcgtcgccaggaaaacggccagatctgcgtggtagagagtccggcggacatctatgccattgagcagaccgggcagtattccggccgctacttcgtgctgatggggcacctgtcgccgctcgacggcatcgggcctgatgacatcgggctcgatcgcctggagcaacggctggaggcggagtcgatcaccgaggtgatcctcgccaccaacccgaccgttgagggcgaggcgacggccaactacatcgcggagctgtgcgcgcagtatggcgtcgacgccagccgaatcgcccacggcgtgccggtgggcggcgagctggagatggtcgacggcaccacgctgtcccactccctggccggtcgccacaagattactttctgaacaaatggaggcggccttcgccgcctccgcttgaaaaatttccccgctgtccccatctcccactcaacggtttttacccatttaaaatggcattgttgaggttgaatcagatgaaaggacaagaaactcgtggttttcagtcagaagtaaaacagcttctgcacctgatgatccattccctctattccaacaaagaaatctttctgcgtgagctgatttccaacgcctctgatgcggccgataagctgcgtttccgcgcgctgtcgcagccggatttgtatgagggagacggcgagctgcgcgtgcgggtttcgtttgataaagacaaccgcaccctgaccatcgccgataacggtatcggtatgaaccgggaagaggttatcgaccatctcggcaccatcgccaaatccggcaccaaagcgttcctcgaatcgatgggttctgaccaggcgaaggatagccagctgatcggtcagttcggcgtcggcttctattcggccttcatcgtggcggacaaagtgaccgtgcgtacccgtgcggcgggcgacaagccggaaaacggcgtgttctgggaatccgccggcgaaggcgaatataccgtagctgatatcaccaaagccgatcgcggcaccgaaatcaccctgcatctgcgcgaaggcgaagatgatttcctcaacgactggcgcgtgcgctctatcatcagcaagtattccgaccatatcgcgctgccggttgagattgaaaaacgggaagagaaagacggcgaaaccgtgatttcgtgggaaaaaatcaacaaggcgcaggccctgtggacccgcagcaaatccgaagttaacgacgacgaatacaaagagttttataagcatatcgctcacgactacagcgacccgctgacctggagccacaaccgcgtggaaggtaagcaggagtacaccagcctgctgtatatcccgtcgcaggcgccgtgggatatgtggaaccgcgatcataaacacggcctgaagctgtacgtccagcgtgtgttcatcatggacgacgccgagcagtttatgccgaactacctgcgcttcgtgcgcggcctgatcgattccaacgatctgccgctgaacgtctcccgtgaaatcctgcaggacagcagcgtgacccgcaacctgcgcaccgcgctgaccaaacgcgcgctgcagatgctggataagctggcgaaagacgacgctgaaaaataccaaaccttctggaaacagttcggcctggtgctgaaagagggcccggcggaagatccgagcaaccaggaagcgatcgccaaactgctgcgtttcgcaaccacccataccgactcctccgcgcagaccgtgtcgctggaagagtatgtctcgcggatgaaagaaggccaggagaagatctactacatcacagccgacagctatgcggcggcgaagagcagcccgcacctcgagctgctgcgtaagaaagggatcgaagtgctgctgctctccgatcgcatcgacgagtggatgatgagctacctgaccgagttcgacggcaaagcgttccagtctgtcgctaaagccgacgagtcgctggacaagctggcggatgaagtagacgagtccaccaaagaagccgaaaaagcgctggagccgttcgttgagcgggtgaaaaacctgcttggcgaccgggtgaaagaggtgcgtctgacccatcgtctgaccgacaccccggcgattgtcaccaccgacgccgacgagatgagcactcagatggcgaagctgttcgcggcagcgggccaggcggcgccggaagtgaaatacatcttcgaactgaacccggcgcatcagctggtgaaacgcgcggccgatacccaggacgacgcgcagttcggcgaatgggtggaactgctgctggatcaggcgctgctggccgagcgcggcacgctggaagatccgaaccagtttatccgccgtatgaaccagctgctggcttcctgacgcgaacctgaacgagtagcccggccgagcgacgcgacgccgggaacgggataaatgccccgtctgagcgatgtgctcaggcggggcatttcacattggattgcataaaatatctcaccattaaccgtttcagccgcaccgccttccttgagccatcgccgttctggtggtatggtttagcgtttttgaaaaattgaatcgacttttgaggggattttcgtaatgcgtattattctgcttggcgctccgggcgcgggtaaaggaactcaggctcagttcatcatggagaaatacggtattccgcaaatctccaccggcgatatgctgcgcgcggcggtaaaatccggctctgagctcggtaagcaagcgaaagacattatggacgcaggcaagctggtgaccgatgagctggtcatcgcgctggtgaaagagcgtatcgcccaggaagattgccgtaacggcttcctgctggacggcttcccgcggaccattccgcaggctgacgccatgaaagaggcgggcattaccgttgattacgtgctggaattcgacgtgccggacgaactgatcgtcgaccgcatcgttggccgtcgcgtccacgcggcatccggtcgcgtataccacatcaaattcaatccgccgaaggtggaaggcaaagacgacgtgaccggcgaagagctgaccacccgtaaagacgatcaggaagagaccgtgcgtaagcgtctggtagaataccatcagatgacagcgccgctgatcggctactacaccaaagaagcgcaggcgggcaacaccaaatacgccaaagtcgacggcaccaaagcggtagctgacgtgcgcgccgaactggaaaaaatcctcggctgataaagccttttctcatcctgctgcggcaggatgagaactcctctcatttctaccttttgctatgattggttccgtttagcgccatttcagctacaattggctgcgattcaaatggttaagaggcggtaatgcatcagacgaaaacaggtatcttgctggccaatttaggcactcccgatgcgcccacccccggggcggtgaagcgctatctgcgacaattcctcagcgacaaacgggtggtggatacgtctcgtctgctatggtggccgctgctgcgcggcgtcatactgccgattcgctccccgcgtgtggcgaagctctatcagtccgtgtggatggaagagggatcgccgctgatggtgtatagtcgtcgccagcagcaggcgctggctgccaggctgccggataccccggtggcgctgggcatgagctatggttcaccgtcactggccagcgcggtggatgacttactggcgcaggggtggagcacatcgtggtgctgccgctgtatccgcaatattcctgctcgacggtggccgccgtctgggacgaactggcgcggattctggcgaaaaagcgcgccattccgggtatctcgtttattcgcgactatgccgaacatccggactatatccatgcgctggcggccagcgtgcgcgcttccttcgctgtccatggggaaccggatctgctgctgctctcctatcatgggatcccgcagcgctatgccaaccagggcgatgattatcctcagcgctgtcgcgatacgacgcgggaactggtttccgcgctggggctgccgccggagcgggtgatgatgactttccagtcgcgctttggccgggaaccctggctgacgccgtacaccgatgaaacgctaaagatgctcggcgagaaagggacgaagcatattcaggtgctgtgcccggggtttgccgccgactgtctcgaaacgctggaagaaatcgccgtccagaaccgggaaatattcctcgaagcaggcggcaagcaatatgaatatattccggcgcttaatgcggacgcagcgcatattgagatgatggtcaatctgacggcgccttatcgctgatcgcgcgcagggcggggaatatgctactatttcccgcttgttccctgttatttaagcgccactatgaaatttcccggtaaacgcaaatctaaacactattttcccgttaacgcccgcgatccgctgctgcagcaaattcagccggagaatgaatccagcgtctcctgggtggtcggtatcgaccagacgctggtggatatcgaagcgaaagtggatgaggcgtttatcgtgcgctacggcctgagcgcgggccattcgctggtgattgaagatgacgtcgccgaggcgctgtaccaggagctggtgcgcaacaatctcattacccatcagtttgccggcggcaccatcggcaataccatgcacaactactcggtgctggcggacgatcgctcggtgctgcttggcgtgatgtgcagcaatatcgaaatcggcggctatgcctatcgttacctgtgcaatacctccagccgcaccgatctgaactatctgcagggcgtcgacggcgccattggccgctgctttaccctgatcggtgacagcggcgagcgcaccttcgccatcagcccgggccacatgaacaagctgcgtcccgaaagcattccggaagcggtgatcgccggcgcctcggcgctggtgctgacctcttacctggtccgctgcaagccgggcgagccgatgccggacgccacgatgaaggctattgagtatgccaaaaagcacgatgtgccggtggtgttaaccctcggaaccaaatacgtgattgccgataacccggcgtggtggcaggagttcctgcaggagcatgtctctattctggcaatgaacgaagaggaaggggaagcgctgaccggctttgccgatccgctgtcagcggcgaataaggcgctggactgggtcgacctggtgctgtgcaccgccggcccggcgggcctgtatatggcgggcttcaccgaagaagaggcgaagcggaaaacccagcatccgctgctgccgggggcgatcccggagtttaaccagtttgaattcagccgcgcgatgcgtcaccaggattgcgttaatccgctgcgcatatattcccatatcgctccctatatgggcggccccgagaagatcatgaacaccaacggcgcaggcgacggcgcgctggcggcgctgctgcatgacatcaccgccaataactaccaccgcaataacgtccccaactccagcaagcacaaatgcaaatggctgacctactcctcgctggcgcaggtgtgtaaatatgccaaccgcgtgagctatcaggtgctgaaccagcactcgccgcgtttaactcgcggcctgccggagcgtgaggacagcctggaagaggcgtactgggatcggtaagcgcgtccctctcccggcggggagagggcagtacatcagccggtgaccacttcgccggccggtggcgtttccagaagccgcagcatggcgcgggcaatttcccgttcgcccatcaccacctgattggctccgcgatcgataatgtagtccacttcgtcatcataatgggcgcgggcgataatctcgatattcggacatttttcccgtgcggaagcgacaatctctccggcctcgtagccgttagggattgtcagcagcagccagcgggcgcaatcgagatgcgccagctccatgatctcttcattggcggcattgccgagcaccgcgctgatcccgcgctcgcgtagctcatccacgcgggtgcgcgaggtttcaaccaccaccagcgggatcccctgggccatcagcttctcgcccagcaggctgccgacgcggccgaagccgaccaacagcgcgtggttgcagatatcgaccggcacctgcttctcgtcttccaggacctcttccagcgtctgctcgtcgagggtttcggttttatcgagatatttttccagcagggtaaacagcaccgggttgagcataattgagatgatcgccccggccagcaccagattttgtccggcctgcggcagcaggttaagcgccattcccaggccggcgagaataaaggcaaactcgccaatctgcgccaggctggcggcgatggtcagcgcggtgcgcggcgagtgaccaaacatccgcacaaggaaaaaggcggctgcggatttaccaaagataataatcgccagcgtcgccagcaccgccagcggctgttggaccagcaccatcgggtcaaacagcatgccgacggagacgaagaacagcaccgcgaaggcgtcgcgcagcggcagggtgtcatgggcggcgcggtggctgagctcggattcgttaagcaccatgccggcaaagaaggcgccgagggcaaaagagacatcaaacagctccacggcgccgaaggcgatgcccagcgccagggccagcaccgacagagtgaacagctcgcgtgagccggtggcggcgctgcgcgacatgatccacggcaccagccggcggccgaccagcatcataatggcgataaaggccaccactttgccaatggtgatcccgaggtcgagggccagggacgcgaagccgacgttgcctttctccgccataccggcaatcgccggcagcaggaccagcgtcaggaccatcaccaggtcttccacaatcagccagccgatggcgatttgcccgcgctggctgtcaatcagttgtcgttcctccagcgcgcgcagcagcactacggtactggcagtggagaggcacaggccaaagacgatgccggtcatcagcgaccagccgagggcggcggagagcgccatacccagcagcgtcgccacggctatctgggcgatagccccggggatggcgatcgattttaccgccatcaggtctttaagtgagaaatgcagcccgacgccgaacatcagcagaatgacgccaagttccgccagttccggagccagtttggtgtcagcaacaaagccaggggtgaaaggtccggccagcacgcccgctaagagatatcccaccagaggagaaatacgtagcttattggcaatcatgccgagaataaaggcgagcacgaggccgccgacaatggtggtgataagcggtgttgcgtggtgcattccgtctcctttccagtggtgtatcggtccattttgctaccctgtccgggtaatagtttatgacaaaaacgttcactttgtttatgaataattcttgagttgtgcaaaaaaatgcaattagccgatgaaaaggcacagaagggaaaatggcggggggaaatcgtggagcaggctgatgacacaagggttaacggcggccagggttgcactttggccgccgaataatcaggctttttgccggttatcaggaaggaatatcgtcaggaatcccagcagcggcaggaaggcgcagattttataaaccagatcaatgctggtatggtccgccagcaggcctaacaccgcggcgccaaggccgcccatgccaaaggcgaagccgaaaaacaggccagaaaccatgccgatgcgtcccggcagcagttcctgcgcatagaccagaatagcggaaaaggccgaggcgaggataaaaccaatgatcaccgttaaaatccccgtccattcaaggctggcgtagggtaaaacaagggtgaaaggcgctacgccgaggatagaaccccaaatcacatatttacgcccaattttatcgccaacaggcccgccaattaccgtcccggcagccactgcgaacaggaaggcaaacagatgaagctgggcgttttgcaccgttaagccgaatttatgcatcagataaaaggtgtaatagctgctaatgctcgccatatagaaatatttcgagaaaatcagcatcagcagaatgcctaccgccagaataaccttcttgcgcggcagcggattaacgatggccggtttcggtttgcccttattcattcgatgctgcgcggcataccagcggctgatttgcgacagcacgacaatagccaacagagcggccagcacgaaccaggcgacgttgcctttgccgtacggggcgatgatcaccgccgccagcaatgggccaagcgagctgccgaagttgccgcccacctggaacagcgactgggccaggccgtgacggccgccggaggccattcgcgccacgcgggacgattccggatggaaaaccgaggagccggtacctaccagtgcggcggccagcagcaccatgccgaagctaccggccagcgcgaggagaatcaaaccgcagagggtgaagcacatgcccaccggcagcgaccacggcatcgagcgtttatcggtgatgtagccaatcaccggctggaatagcgatgaggtgagctggaaggtcagggtgatcatgccgatctgcacgaaggtaagggagaactccgcctgcagcagcgggtagatagcgagaataagcgactggatcatatcgttaagcaaatgggacaggctgatcgcgcctaagatgccaaacgaggtgcgtgctttttgcggcggcgcagcggggccggacaagggttgagcggtctgattgattgccataggttcacgtcacttttttatatagctttcgtcttttgtcagccatggcgactgccctgattttcccggctactgcatgggaaatatgacgaacgggctgacgcaatgccatacaacgcgaaggcgtatagaggatgcaggtagaattattatccaactaacatacctgctgataaggtttgaaggaagtcgcaattctgaaaacatatttgtcaacgcgactaactcgctatactttcggcacttgggattaagtcagggagtgaagcatgcattatttcaaacacagcgtagcgctggcgctattcgccgctttatcgctgggcagcttgtcggcacaggcctatgagcaggataaaacctataaaattaccatcctgcacaccaacgatcaccacggccatttctggcgcaatgactacggcgaatatggcctggcggcgcagaaaacgctggtcgatggcatccggaaagaggtggcggcggaagggggaagcgtcctgctgttatccggcggcgatattaataccggcgtaccggagtctgatttacaggatgcagagcccgattttcgcggcatgaacctcatcggctacgacgcgatggcggtgggaaaccatgaattcgataatccgctgagcgtactgcgccagcaggaaaagtgggctaagttcccgttcctgtcggccaatatttatcagaaaagcaccggcgaacggctgttcaaaccctgggcgttgtttaagcgcggtgggctgaaaatcgcggtgattggcttaaccaccgacgatacggccaagattggcaatccggaatatttcaccgatattgaattccgcaaaccggcggaagaggcgaagctggttatccaggagctgcagcagaatgaaaagccggacgtgatcctggccaccacccatatgggccattacgacaatggcaaccacggctctaacgcgccgggcgatgttgaaatggcgcggagtttacctgcgggatcgctggcgatgatcgtcggcggtcactcgcaggatccggtatgcatggcggcggaaaataaaaagcaggtcgattatgtgccaggcaccccgtgcgctccggatcgtcagaacggcatctggatcgtccaggcgcatgagtggggcaaatacgtcggccgcgccgattttgagttccgcaacggcgagatgaagctggtgcactatcagctgatcccggtcaacctgaagaaaaaagtgacttacgataacggccaaagcgagcgggtgctgtatacgccgcagatcgccgagaacccgcagatgatgtcgctgctgacgccgttccagaacaaaggcaaggcgcagctgcaggtcaaaatcggcagcgtgaatggtcatctggagggcgaccgcagtaaagtgcgctttgtgcagaccaatatgggccacctgctgctggcggcgcaaatggcgcgcagcaacgcggatttcgcggtgatgagcggcggcgggatccgcgactccattgaggcgggggatatcacctacaaagatgtgatgaaggtccagccgttcggcaatgtgctgacctatgtcgatatgaacggcaaggaggtagtggattacctgaccgccgtcgcgcagatgaagccggattccggcgcttatccgcagtttgccaacgtcagtttcgtggccaaagacggtaagctgaacgatctgaaaatcaaaggcgaaccggtggatccggcgaagacctatcggatggcgacgctgagctttaacgccaccggcggcgatggctatccgaacatcgccgataaacccgggtatgtgaataccggctttatcgatgccgaagtgctgaaagagtatatcgagaagaactcgccgctggatgccgccgcctatgagccgaaaggcgaggtgagctggcagtaagcctgggcttcaggttggctatttccccggtggcgctacgcttaccggggctacgagttgggtatcccggataaggcgcgtgcgccgctatccgggatcgttttatcaatcgcggcgggcgatatcggcgaacttcgcatcgagaagctgcgccagatcgctggccgccagctcaatatccagcccgcgtttgccgccggaaatatagatggtggcaaattcctgcgccggggcgtcaatcaccgtcggcaggcgcttcttctgccccagcggactgatgccgcccaccagatagccggtgatacgctgcgccaccatcgggtcggccatgtcgactttcttagcgcccagcgctttcgccactttcttcaaatccagctgcccggcgaccggagtgacggccaccgccagatgcttcatatcgccgttcacggcgaccagcaaggtcttgtaaacctggtcggcattgaggccgagcttgcgcaccacttcatctccgaagttggtctcattgggatcgtgatcgtaactgtggatctgaaaggaaattttgtttttttcgagtaatttaacggcgggagtcatagctatccttcttaccaaccggttttgcgtgacgtcagaatacgcccgcaggttgtctaaaaaatagtaccatcttgcgcaatagtgttggcagtgatggtcactttgagcgacaatcagacgatccgggatgcaaatcccgggataataataatgatgaaattcctctttgacgggccaatagcaatattggccattttttttatgtcagcatatccggcagattcccttcgccatacaggtgcagcgcgccgacggcaaccacgtagcgccccggcggcaaggccagcagcgtctcgcgccaggcgaggttgcgctggtgcatcagcacatcatataaagactggctaaaggtcgtcggcagcgataccgcgccgcgcgacggcggttgctccagccaccagccgatcatgacctgcagtaaacgggcgttggtgcgccagtgggtcagcgtatcctccagcagcgccatccccccgtcgggcagatcgcgcagcagcgcgatttggctgtcggcgccttccagctccatcaccgctatgttgctctcgcgggcggccatcagcaactgataatcgatgccgtaatctggtcgcagccccagcttctgcgcctgggtggcctgcaggaccatcgccacctgccacagcggctggctgtcgaacagcccgaccgacaggcccagctcgccggctcgcgcctctagctcgctcagctgcgcatcgctcaggcgttccgccagcggtgggtaagtggggagattgctaaacggggtttcattgccgctgatatcggcctcgacgattaacgcatcggcctggcgtatttttttcagaagctttgccggcggcggcgccatgtcgcgggtgcccatatggatactgccgacgaggtgcaaatagcgttcgccgggcaggacgatatccatcgcaggccaggaataagacgagccgacggcggctcgccacagcatttttatccggtttaacaggcccatacgcgctccgaagtgtgaggacttcatgctagcgcatatggtgatacacgtcacccttccggcgggcttttcttgtcccggcaaaaaaacgggcaccgaacaacgtcggcgcccgtttcatctgacggcgtttactcttttggtttaaagcgcagcaggcggttggcgttactcaccacggtgatcgacgacagcgccatcgccgcgccggcgaccaccgggtcgagcagggtgccggtcagtggccaaaggatcccggcggcaatcgggatacccagcgagttgtagacaaatgcgcccagcaggttctgcttcatattgcgtaacgttgctttcgaaatcgccagcgcatcggccacgccgtgaagactatggcgcatcagggtgatcgccgcggtttcaatagcgacatcgctgccgccgcccatggcgatcccgacatccgcctgggccagcgccggggcgtcgttaatcccatcgccaaccatcgccactttgtgtccctggctctgcagacgcttaatggcatcggctttatcgtccggtagcacgccggcgatcacttcatcaatgccggcttctttggcgatagccttcgcggtggtggggttatccccggtaagcatcaccagccggtagccctgccgatgcaaacgcgccagggcgtcgacgctgtcttcgcgcagcgggtcgcggatggcgaacagcgcggcggcctgaccatccaccgccagcagcaccggcgtggcgccgcgtgaggcctgggctgtcatctcgctttccacctcggcggtattgatatgctgctcgttgagcagcgcctggttaccgagcagcagacgatgaccttccgcctcgccgctgacgccaaggccgcgcagggtgcggaagccgctgacttccggcaatgggccgtcggcagctttatcaaggatcgctcgcgccagcggatggcttgagccctgctccagcgcggcggcaagacgcagcgcggtatgctcatcaacgccagcgaaagttttcaccgccaccacttgcggcttgccttcggtcagggtgccggttttatcgaacaccagggtgtcgagttcactggcgcgctgcagcgcatcggcatcgcgcaccagcacgccgtactccgccgcccggccaacgccggagataatcgacatcggcgtcgccaggcctaaggcgcacggacaggcgataatcagtaccgtggtggcaatgaccagggtatagacgatctgcggcgccgggccgaagaagtaccagatcgcagcgctaatcagcgcaatgacgaccaccgccggaacaaatacggcggagattttatccgccagctggccgatctccggtttgctgctctgcgcctggcgcaccatgcggataattcttgccagcgtggtctggctgccgacggcgctggcggtaaacagcacgctgccatcctgcaccacggtcccggcgtgaatggcgtcgccatcgcctttttgctgcggcaccggttcgccggtgagcatcgcttcatcaaaccaggcttcgccctggcttatcatgccgtcgaccgggacgcggtcgccggtagtcaggcgcagggtcatgccggcctgaacttccgcgagcggcagatctttctcgccctcgggcgtgacgacccgcgccgaaggcggcgtcaggtcgagcagtttttccagcgctttcgaggagcgctgacgcgcgcgggcctccagcatatggccgaggttaatcaggccgataatcatcgcgctggcttcgtaatagagatggcgggcttccatcgggaaccactgcggccacaggttgacgctcatcgagtacagccaggcgacgccggtgccgagcgccaccagcgtgtccatggtggcggtgccgtttttcaggcttttccacgcgctgcggtagaagtggccgccggcgaagaccatgacggcgagggtgacaaggccgataaccagccacagcgaacggttgtcgtcgctgaccatcatgttatcgccgatcatgccccagaccatcaccggcacgccgaccagcagggcgacaatcgcctgccagcgaaaacgtttcatcgtcgcgagggcggtttcctgctgacgttcgcggcgttgcagatcgtcttcgatcgcctccgcgccatagccggctttctccaccgcctgcactaattctgcggcggacgcactgcccatcaccagcgccgtgcgttccgccaggttaacccgcgcctgtgagacgcccggcaccgcggcaagtgcgttttgtacccgggagacgcagctggcgcagctcatgccgttgatcagcagctgttgactgtcatcttcgtcatgggctgccggaagctcaggagtggccgctgtcagtgcttccgacgggattgatgattctgccagcggtttagcctttgggtggctgagctccgcgccgtatccggcttgtttaacggtatcaatcagcgcttgcgcgctggcgctgcccgtcacatgggcttcagtgagggttacttccgcttgctcaacgtcaggacgctgctccagactctctttcacgcgtttgacgcagtggccgcaggagaggccatccagcgtcaggtcgatagtgttagacataaataactcctgaataattttccggtcaacgattgaccagacccactctttcatcgagtattaagaaggttaaaccttccagcaaggggaaggtcaaggagaaaaaatgaatatcagcgatgtggcgaaaaaaaccggcttaaccagcaaagcgattcgtttttatgaagagaaggggctggtgacgccgccgttgcggagcgaaaacggctaccgcacctatagccagcagcatctcgatgaactgacgctgctgcgccaggcgcggcaggtggggtttaacctggaagagtgccgcgagctggtggcactgttcaacgacccgtcgcggcacagcgccgatgtgaaaaaacgcacgctggagaaagtggcggatatcgagaaccatatccgcgagctgcaaaatatgcgcgcgcacctgctggcgctggccgaatcctgccccggcgacgacagcgcggagtgcccgattatcgataatctttccggctgctgccatcgcaaggcgcaggcttaacggacggcgggtctgattcgtagcgtaatcccttctacggcaatcacttcaaccttgctgcccgccgcgaagtcttcatcggcaatcaccggccaggagctgtcgcccacgcggacgtggccgcggccgttcaccagcggggcatccagcgtcaggcggcggcccaccagttgctgcccgcgctggttgagctgggcatcggccgggcgctgcgttttgacgcgcttgcgcagccatttcgaccacagccacgccgccagcagggtgagaacggcaaacagcgtgccttgccattcccagctcagcggcaggagccaggtcagggcgccggtcaccacgccggcgacgccgctccacagcaggtatccgctgccgcccagcatctcggccgccagcagcagcccgccgaggcttagccagaacagatgggggtgtgtgaggatcatgccgatcatgattttttccgatcgccagcgccttctttgatcagctcgctgatcccggcgatcgatcccatcaggctgctggcatccagcggcatcaataccactttgctgttgttagcggcgccaatctgctgcagcgcatcggtgtatttctgcgccacgaagtagttgatcgcctgaatatcgcctgaggcgatcgccgaggagaccatttgggtggcgcgggcttccgcttcggcggaccgttcgcgagcctccgcctgcaggaacgcggactgccgttcgccctcggccttgaggatctgcgactgcttttccccttccgctttcagaatttccgcctgtcgcaccccttcggcctcaaggatgtacgcgcgtttggtacgttcggctttcatctgggcgttcatcgaggcgataagctccgccggcgggcgaacgtcgcgaatttcgacgcgggtgattttcaccccccacgggttggtggcgtcgtcaacgatatgcagcaggcgggtgttaatgctgtcgcgctgggagagcatttcgtccagctccattgagccgagcacggtacggatgttggtcatcgtcaggttgacgatcgcctgctcaagattgctgacctcgtaggcggcctttggcgcgtcgatcacctgaataaaacagaccgcgtcgatggtgacgttggcgttatcccgggagataacctcctgcgaggggatatcgagcacctgctccatcatgttcactttgcggccgatacggtccataaacggcacgactaagcttaatcccggctgcagcgtctgggtaaaacgcccgaagcgctccaccgtccactggtagccctgcgggacaattttcaccgccgcggccacaataaccagcgcgacgaaaataaggataggaataaaaattagcatcaaaaacctcctgtcttgttgcctggcggggcgctacaaggaaatagcgcatgtttaaactgagtatatctttctcctcatcctggagaaaggaaagtgcggtaaactagcggtgtttcagaaaataatcaggaagactcatgaaggaaaataacgcgcttttgcgtctcgacggtgtggggtttaagaccgacgacgccgttattttacacaatatcaattttcagcttcgcgccggagaattcaagttgattaccggcccttccggctgcgggaaaagtaccttgctgaagattatcgcctcgctgctcagcccaacctccgggcgcctgttcttcgacgatgcggatgtcgcgacgctgtcgccggaaaggtatcgccaacaggtctcttactgcgcgcagacgccggccctgttcggtgattcggtttacgataatctgatttttccgtggcagatccgcaataaacaaccggatccgcaggcgctgctggccgacctgcagcgctttggccttgacgaaaatatgctggaaaaatccattaacgaactgtccggcggggaaaagcagcgcgtatcgctgatccgcaatctacaatttctgccgcgcgtgctgctgctggacgaaattaccagcgcgctggatgaaagtaataaacagaatgtgaatgaaattattcatggctacgcaacggaaaaacaggtcgctgttctgtgggtcacccacgatcgcaatgaaatttcgcatgccgatgaagtgattacgctgcaacctgccggcggaaatatgcaggaggtacagcatgaacgggcataacattacgaacgaatcgctggcgctgtcgatggtgctggtgctgatcgctattctggtcagctatcgggaaaagctggcgctggaaaaagatattatctggagtatttgccgggcgatcgtgcagctgataatcgtcggctatgtgctgaaatatatctttaacgtcaatcatgcggttctgacgctgttgatggtgctgtttatctgctttaacgcggcgtggaatgcgaagaagcgcagtaaatatatcgacaaagcttttatctcgtcgtttatcgccatcactactggcgctggactaacgctggcggtactggtgttttctggctcgatcgccttcgtgccgatgcaggtgatcccgattgccgggatggtggccgggaacgccatggtggcggtagggctgtgctacaacaatatgggccagcgcttcagcagcgagcagcagcagattcaggagaagctgagcctcggcgcgacgccgaagatggcctcagcgcggctgattcgcgagagcattcgcgcgtcattgattcccaccgtcgattcggcgaaaacggtcggtctggtgagcttgcctgggatgatgtcggggctgatttttgccggtattgacccggtgaaggcgattaagtaccagatcatggtgacctttatgctgctgtcgaccgccagcctgtcgacgattatcgccggctatctgacctaccggaagttcttcaacgcccgccatcagctggtggtgacgcagctgaaaaagcgcccgtgaacgatcccgggttgcggcgttcacgccttacccgggctacttaggctacgttccgcatagttcgcgtagcccggataagcgcagcgctatccggggaaggcaacggattagtacagcagcgaatagagctgacgacgatatttggcggccagcgcatcgccggtaccgagggcggcgaggatctcctgcagcatcttgcgcgcctggccatcgccggcgcctaaatctttctgcagatggctgaacagcagggccagcgcttcttcattacgcccgacctgatgcagctgcagtgccagctgggaggccaactgcgcatcctccggattctgttccacctgctgctgcagctgctggatttccggggtgtcggcggcctgtttgagcagctcaatctgcgccaccagaccctgatagtgggtatcctgatcctgcagaggaatggttttcagcacgctttccgcttcatcggaacggtgcagagcaatcagcgtttccgccagcagcaggccaatctggctttcctgattcgacagctgccaggcttccttcagcagcggcagggcatcggcgtatttttcttcctgcatcagggccagcgcctgctgagctttcagctcctcttcacggggcaggactttatccagcagggcgcggatcgcttcttccggctgcgggccttcaaaaccatccaccggctggccgttctggaacagataaaccgtagggatggcgcgcagaccaaactgtgaagcgagcatctgctcggcgtcgcaatcgaccttcgccagcgtgaactggccgttgtattgggctgccaggcgctcgagcaccggggtcagctgttcgcagtgctggctgcgggcagaccagaaataaaacagcaccggaacgttcatggactgctgtagcgtctgctgcaggttcacttcgctaatgttgacaatattctgttcggacatgggcatttctcgttagtcgatttctgttttacatgggggcggcattccgcgcttcaactcagccgtggataattttgtccatcgcgcgggcaggcagcaggcgcttaagcagcgccaccgcgtgggtgaccagggtgaccggatagcgcagctttggtttatcgctggtaaaagcattgcgcactttttccaccaccgcctccggcccgagggtaaagcgggcggcgatgcccggattttctacgggcttatcgctttgcgtctggttgacgttatcggtaaagcgggtgcggatcgggcccggttcaatcaggctgacctgaataccgctgtggcgcagctccatgcgcagcgcgtcggaccacgcctcgagggcatatttactggcggcataggctccgcggccgggactggcgataagccccatcaccgaggaggtcatcacgatgcgcccttcgccgtgcggcgtcatcgccggcagcagcagcatggtgagctgatgcgcgccgaaaaagttagcggaaaattgctgttccatctgctggcggctgatggtgttcagcgggccatagacgccatacccggcgttattgaacaggccgtagagacgattatcggtcagcgcaatcacctccgctgccgcgcgctccacactctgcgggtcatccagatcgagcaaaataccggttagccccagatcctgcatccgcgcgacatcctctgctttgcggcaggccgccagcacgcgaaagccctggcgggttaaatccagcgcgctttccagaccaattccgctggaacagcctgtcactaaaaccgttttttgcataactttacctgtcagcgacccctggcgttcaggagtcatgattaactaagggagccagccgcttcgccatccagtcggcgataaacggctgcgcgtcgcgatttggatgaatgccgtcgtcctgcatccattgcggcttgagatagacctcctccataaaaaagggcaggagaggaatagcaaactctttggccagggccgggtaaatcgcgccgaaggcttcattatagcggcggccatagttcgccggcaggtgaatttgcatcagcagcggctcggcgttggccgctttgatatctttaataatggtgcgcagcgtctgctcggtctgctgcggcggaaaaccgcgcagtccgtcattgccgccgagctcaaccagcacccagcgcggctggtgctgcttaagcagcgctggcaggcgagccaacccctgctgcgaggtatcgccgctgatgctggcgttcaccaccggcgttttcgcctgccactgctcattgagcagcgccggccaggcggcgttggccgccatccgatagccagcgctcaggctgtcgccgaggatcagcagcgtgtccgccgccatcgcgcggcaggtaaacaggaacaacaacaggaaaggcacatgccagcggaaaacatacttgaagttcatcatcttaagaagtccgtcggtcagggggagcatcagctctccatccttaccggagttgagctggttgtcaaaccgcggcagaccatcgccctgatcggcgagtcgggttccggtaaatcgaccctgctggcgatcctcgccggcctcgacgatggcagcagcggggaagtatcgatgctgggcaaaccgctgcaccggatggatgaagaggcgcgggcggcgctgcgggcgcagcacgttggttttgtttttcagtcgtttatgctgatcccgacgctcaacgccctggagaacgtcgagctgccggcgctgttgcgtggcgccagcgatagccagagccggggcgatgcccgcgcgctgcttgagcagctgggacttggcaaacgcctgcaccacctgccggcgcagctctccggcggcgaacagcagcgggtggcgctggcccgggcctttaacgggcgcccggccattctgttcgccgatgagcccaccggcaacctcgatcgccagaccggggacaaaattgccgatctgctgttctcgcttaatcgcgaacacggcaccaccctgatcctcgtcactcacgatccgctgctggcggcgcgctgcgatcgccgtctgcgcctggtggatggccagctgcgggaggaagcatgatcgcccgctggttctggcgcgaatggcgctcgccgtcgctgctgatcgtctggctggcgttaagcctcgccgtggcctgcgtgctggcgctggggtcgataagcgatcggatggagaaaggacttagccagcaaagccgtgagtttatggccggcgaccgtacgctgcgcagttcgcgcgaggtacccgcagagtggatcgcacaggcgcggaagtcagggctgaccgtcggcgagcagctgagctttgccaccatgacgttcgccggtgatacgccgcagctggcggacgttaaggcggtggacgaccgctatccgctgtatggcaccctcgagacgcagccgccggggctgaagccgcaggcggggagcgtgctgctggcgccaaggctgatggcgctcctgaacctgaaaaccggcgatacgattgacgttggcgatgccacgctgcgcattgccggggaggtgattcaggagccggatgcagggtttaaccccttccagatggcgccgcgactgatgatgaatatggccgacgtggcaaaaaccggggccgtgcagcccggcagtcgcgtcgcatggcgctataagttcgccggcgacgctgaacagctggccaattatgagcagtggctgctgccgaagctcggcccggagcatcgctggattggccttgaccaggacgacagcgcgctgggcaaatccctcgaacgctcgcagcaattcctgttgttatccgcgctgttgacgctgctgctggccgtcgccgcagtggcggtagcgatgagccactactgccgcagccgctatgatctggtcgccatactcaagacgctgggcgccggacggtcgcagctgcgcaagcttatcgtcggccaatggctgctgctgttgacgctgtcggtgataaccggcggggtggcgggcctggcgctggagcgtctgctgctgctggttctcaaaccggtgctgcccgccgcgttacccgctgccagcggttggccgtggctgtgggctatcggggcgacaggcgtcatttccctgctggtgggcctgcgaccctatcgactgctgctggcgaccctgccgctgcgagtgctgcgtcaggatgtggtggctaacgtctggccgttgaaaatctggatcccggcggttagcgtcgtggtggtgggcctgttggcctggctgctgggcggcagcccgctgctgtggtcggtgctggccggggcggtggtgctggcgctgctgtgcggcctggtgggctggggattgctgtggctgctcaaacgcctgacgctcaaagccttgccgctgcgtctggcggtgaaccgcctgctgcgccagccgtggtcgaccctcagccagctggcggcgttttccctgtcgtttatgctgctggcgctcctgttggtgctgcgcggcgatctgcttgaccgctggcagcagcagttgcccccgcagagcccgaactactttctgatcaatatcgcccctgagcagatagtgccggtgaagaccttccttgccgaacaccagacgcgggcggcggaattctatccgatcgtccgggcccgtctgacgcagatcaacggtcaatccacggacggaaacaaagacgaagcgctgaatcgcgagcttaatctcacctggagcgaacagcgtccggatcataatccgctggtggccggcagctggccgccgaagccgggcgaggtatcgattgaggaggggctggcgcagcggctggggataaagatcggcgatacagtgacctttaccggcgatacccaggagttcagcgcgaaggtcagcagcgtgcgcaaagtagactgggagagcctgcggccaaacttcttctttattttccccgccggggcgctggacgggcagccgcagagctggctcaccagcttccgctgggataacggtcccgcgatgttgacccagctgaaccgcgagtttcccaccgtcagtctgctggatatcggcgccatcctgcgtcaggtcggccaggtgctctcccaggtcagccgggcgctggaggtgatggtgggcctggtgacggcctgcggcgtgctgctgttgctggcgcaggtgcaggtcggtatgcgtcaacgccatcaggagctggtggtctggcgcacgctgggggcaggaaaatcgctgctgcgcgctacgctgtgggcggagtttgccctgctggggctggtttccggcctggtggcggcgataggcgcggaagtggcgctggcgatgctgcagacgaaagtctttgattttccctgggcgccggactggcgcctgtgggtgttgctgccgctgacgggagcggtgttgttatccctgtgcggcggcgggctggggctgcgtctgttaaaaggaaaagcgctattccgccagtttagccagtaagaatattgcattttgatgatgcgccgccgtttttggcggcgcttttattttaaacgcacaaattgataaatcattgatttttaagagcacaaaacattaaaaacccaacaacacgctatgctgattcgcggttaatattcaactggaaaatataaggtggcttattaatcaaggaaaaactatggcacacacaataaaagcgctggcgatctcgatcggcgcagcattagcgttaacgtcattgccttcccacgcggagattacgctgctgaaacaagatccgcaggcgggcgatccgttaagccggcttaactttaccgtcggcggcagtatccggccgcagttcaacatgatgaccggcgatggcgacaaaggctcctataagcgtaacggttttgacggcggcacccgcttccgcttcgcggcggattactacctgttcgatgatattagctggatcagctactatgagctgggcgtgaacattccggcgctgtttgactgggataaccactacgcggaaggcgcgaacaataccacccgccgcatgctgtataccggcctgaaaagcgatacctggggtacgttaacctacgggcagcagaacagcatttactatgatgtggtgggggtgaaaaccgatatctgggactacgatatgatcggtcaggccccggggaacggtattaatggcgattacgatggctcctatcgttcacgtaatatgctgaaatataagaaaactgtaggtgatgtcgatctttacggctcttatctgttcgaagacagcgaatacctgccgggtaacggcctgcgctacaagcgtaaaggcggtggttctgttggcgcggactaccacatcatgaaggatctgacctggggtaccgcgtggaactacacccgcgcggaaatgcgcgacccgtcaagcgccgacagcaaaacctatgaccagaatatcgtaggtaccgcgctgagctggaccccggataactggaccttctccttcggcggcggctggtatcagaacttcctcaccaccaagaaaaccgatgtgcataattactttgccggtgacgcctgggggattgaatattttgcgggctataaattcccgatcaatcaatacgctgttaaatctattcagccgtactttatgggcgaccgtctggaatatgtgaacggccgcaactatcagcgtatcgataacggtctggggattagcttccagctggattacggtttccgcgttgactacgaacacgtgtttacctccagcaccgacaaccttggcgatatgaacctggtccgtctgcgctacgacttctaagcggtcacaactccccggtcgcgcgcgcttaccgtggctacaaatcgcgccgaccggtagcccggctaaagcgtttacgccgcaagccgggacaatagagcatgcgattacttcgccagccaggctgcgacctcctgccaactgccgcgaaagacaattttcccggcttttttccccaactgatagcgatacatcgggtcgtagtattcttccagcagcggtaccagccaggcaaagtgcgcctcggtgctggcggtgcgctgctgctgcaccagcgcctcatcgagccgttcagtgagctgagcaaaacgctgcagccccaggcgacggcggatggcaaacaggccgtgatgcagatactcgccgtatgcctgccagcctttctcttcgccatacacggcgataaagtcgcgatacatgcgatcgaaatactcttcgcgcagccgttcgaggcgaacgtcaaacggatcttccaccaccgccagcggcgactgcgccatgcggaggcgcaggctctccggtagatgattggcgccgatcatatggccttcatcttccagcacccagcgggtctgctgttcggcttttttaagcaggctgaccgccagatggttttcaaaggtggcctgcggatgctgatcctgcagggttcgaccgaatgaagaaccgcggtgatgagcaagcccttccaggtcgataccgtccgggcgcgagcaaaccagctgagttttgccgttgccggtacagccgccaatcagcacgatcggccgctgcaccagttcgtcggtggcctggatcgccgcctggcgtagcgctttatagccgccgacgatcagggggtaatccacgccagcttctttcagccactgctggacgatatgcgagcgctggccgccgcgggcgcagcacaggtaaccgtgtgggtaacgggcgcacgcttccagccacgcctgagtacggctggcgcgcaggtcaccctggaccagtttatggccgagcgccagcgccgcttccggcccctgacgcttgtagcaggtgccgaccgcggcgcgttcttcatcattcatcagcggcaggttgatcgccgccggcatcgcgctttggctaaactccaccggggcgcgtacgtcaatcagtggcgtatcgctggcgagaatggcgcgataatccgtcccattggtcatggggtatcctctgaagtcaaaacagaaatgagctttacagcaagggggggattgtacgcgcctcaaggtgtgccggggaaggggatagatcaaatccccggcacgaagggcttagctgagctgcgattgcgcccagaacaggccgctggtgtactccggcggcagcagcggcttgatcgcttccagcgtcgcgctcagacgatcggtatcgctgtcggtgaggttcaggtggccgactttacgacccgggcgcacctctttgtcataccagtgcaggtgcaccagcggcagcttcagccagtcgtagttaagatcggtgccgatcaggttgatcatcaccgacgggctgttgaccaccggcggcggcagcggcaggccggtaatcgcccgcagatgcagctcgaactggctgatagacgccccgttctgcgtccagtggccgctgttgtgcacccgcggcgccagctcgtttatcagcagcccctcggcggtaacgaagcactccatcgccatcacgccgacgtagttcagctcgttcatgatcgccgtcagcatgctttccgcttgttcctgctggcgggcattggcctgcgggaaggcgacgctggcgcgcagaataccgtcctgatgcaggttacgggtcagcgggtagaagacggtgctaccgtcatgagcgcgggcgcccaccagcgatacctcgccggagaagttaatcccctgctcgacgatgcactcgccgtagttatcggccggtagctgatcgatttcgttttcccgcagacgccactggccgcggccgtcgtaaccgccaacgcgacgcttaacgatcgccagttcgccaaggcgagcaaacaccgccggccactcgcttttatctgccagcagctgccacggggcggtggcgaggccaagcttgtcaaacagctgcttttgcgtcaggcggtcggcgataatcgggaagacatcgcggttgacgaacgccgggtggcgggccagctcgcgggtgagggcggtttccggccagcgttcaatttctgccgtgatgacgctctgctggaacggcaccgcttccgggtcggcttccagccccaccggccagacggcgatgcccagcggctcgccggcctggcgcagcatacggcctaactggccgttaccgagcacgcatacctgtttcatgccgcaccccgcggatccggattatccagcacttcatcggtttgcgcctgacgccaggcgctcaggcgctggtgcagttcagcatcgtgctgggcaaggatctgcgcggcgagcaggccggcgttcgcagcgccagctttgccgatggccagggtaccgaccggaatgccgcgcggcatctgcacaatggagtagaggctgtcgacaccgcttaaggctgcgctctgaaccggtacgccgagcaccggcaccagggttttcgccgcaatcatgcccggcagatgcgccgcgccgcctgctcctgcaataatcacctgataaccgtggctttcggcgctttcagcaaagctgaacagcttatcgggcgtgcggtgggcggagaccacttcgacatggtacggaacgttcagggcatcaaggatttctgcggtaaattgcatggtagcccagtcgcttttggaccccatcacgatggcgatacgcgccgaattattgcgggaagacatgcgtcttaaaactcctgtgggtgtgtttcacactgctttagaggccatagagaatagcatgaactgccagcaaggaaaacggttgcgtgcgcatggttagccgtcttttgtctcgcctggaggtgatggcgtgggtgcctgattgacctttatctccctcatgatacaggtgataagcagcactaacccccacgggagcatcagggtgcccataagcagtaaatagatttgtaccagccggctatcgtgagggcgggtgcagagcaaataaatggcataaaaatagatagcccacgccagcatcgcacaccagacaaacgtcagcgtgttgccgataacgacgccgattaaggcgatataacttacccctaacggattgaggatcgcgatgatcattccccacatcagcggctgactccaccttttcctgctcatgctcgttccttgagagtgacgttgtggaagactagcatgcagggcggggggaagcgcgcaccttcgcccgggcaaaaggcgctttcggaattgtgctcgcgcaggaattagaacggaaagtggattagttcgacgtcgtccggcgtcaccttgaccatcgaaccttcgctgtgccaggcgccaagtaccacacgccatgcgggttggccgttggcctgcagttcatggaccgccgggcgatgagtatggccgtggatcagccactgcacgtgatgccgctccattgcgtcaactaccgcctgtggattcacatccataatttccattgatttactgctgttggcggctttgctgtcggcgcgcatgcgggcggcgatgcgatggcgaataaacagcggcagggccaggaacaaacgctggatccacggggtgtggactttggcgcgaaacgccagatagccttggtcatcggtgcacagcgtgtcgccatgcatgatcaagacttcacggccatagaggtccagtcgctcttcttcggcgagcaggatcatcccgctctggcgggcaaagcgctggccgacgagaaaatcgcggttgccatggatgaagtagcacggcacgccggcgtcgacgacggctttgattgccgaggcaatttgttggtgcagcgggttaggatcgtcatcgccgatccatgcctcaaacagatcgccaaggatatacagagcgtccgcctggcgggcttcgccctgtaaaaaacgcagaaaaccggcggtgatcgccggttcttctgtttgcaggtgcaaatctgcaataaaaagtgtcgccacgaattactcgctgacggtgacgcttttgatgatcacatcatctttcggcacatcctggtgcatgccgctgcggccggtggcaaccgctttgattttgtctaccacgtccatgccttcaaccacttccgcgaagacgcagtagccccaaccctgcaggctttcgccggagaagttcaggaagtcgttgtcaaccacgttgatgaagaactgcgcggtggcagagtgcggcgcctgagtacgggccatcgccagcgtgccgcgggtgtttttcagaccgttgttcgcttcgttctgaatcggagatttggtcgctttttgtttcatgccaggttcaaaaccgccgccctgaatcatgaagccgttgataacacggtggaaaatggtgttgtcgtagaaaccttcgcggcagtagtccaggaagtttttaactgtttccggcgctttgtcgtcaaacgttttgattacgatatcgccatgattggtgtggaaagtaaccatttttgcatcctgttccgatgagtgtggtgccagcacccggtgtcgggtgagatataggggggtgttatagcataaccgcgggggtcgatgcaccttgcaatgtgtgctgcgtccggtctgaattatgggtattatagagacttcattacccacacacgtctacacggaatcttcgatgttaaaaatttttaatacactgacgcgccagaaagaggaatttaaacctatccatgccggggaagtcggcatgtacgtgtgtggtattaccgtttacgatctctgtcatatcggccatggacgtaccttcgtctcctttgacgtcgtggcgcgctatctgcgttttctcggctataagctgaagtacgtgcgcaatatcaccgatatcgacgacaaaatcattaagcgcgctaatgaaaacggcgaaagctttgtcgcgctggtcgatcgcatgattgccgaaatgcacaaagattttgacgcgctgaatattctgcgtcccgacagcgagccgcgcgcaacgcaccatattgcggagatcattgagatcaccgagcagctgatcgccaaaggccatgcttacgtggcagataacggcgacgtgatgttcgacgtgccgacggacccgaactacggtctgctgtcgcgccaggatctagaccagctgcaggcgggggcgcgcgtcgacgtggttgacgtcaagcgtaacccgatggacttcgtcctgtggaaaatgtcgaaagagggcgagccaagctggccgtcgccgtggggcgcgggccgtccgggctggcatatcgagtgctcggcgatgaactgcaagcagcttggcaaccacttcgatattcacggcggcggttcggatctgatgttccctcaccatgaaaacgaaatcgcccagtccacctgcgcccacgacggtgaatacgtcaactactggatgcactccggcatggtgatggttgaccgcgagaagatgtcgaaatcgctgggtaatttctttaccgtccgcgacgtgctgaagtattacgatgcggagacgattcgctacttcctgatgtccggccactatcgcagccagctgaactacagcgaagagaacctcaagcaggcgcgttcggcgctggagcgtctgtacaccgcgctgcgcgggacggacaaatccgtcgacgcggcggggggcgaagccttcgaagcacgctttatcgaggcgatggacgacgacttcaacaccccggaagcctattcggtgctgttcgatatggcgcgtgaagtaaaccgcctgaaaaccgaggacgcggccgcggcgaacgccatggcggcccacctgcgtaagcttgctgcggtactgggtctgctggagcaggagccggaggcgttcctgcagagcggcgcgcaggttgacgacgcggaagtggcggagatcgaatcgctcatccagcagcgtctggacgcgcgcaaagcgaaagactgggcggcggcggatgcggcgcgcgaccgtctcaacgagatgggcattgtgctggaagatggcccgcagggcaccacctggcgccggaagtaagccataaaaaaacgcccgcaaaagcgggcgtttttattttcgttgtcaggccgtgacggtcacgctctggccttcaaagctcaccgtctgaccagcgacgattttgcagcgtttgcgggtttccaccgcgccgtcgacttttaccagcccgtcggcgatggcgatcttcgcctgggcgccgctttcgctccagccttccagcttcagcagatcgcacagctcaacgtgcgggtgtttacctaaggaaaatgtcgccatctcaggcctcctcaacgtcgtgatactcttcgcacgcctgcagcgtgttctggatcagggtggcgacggtcatcgggccaacgccgccgggaaccggggtgatgtaggacgcgcgttcggcggcatcttcatacaccacgtcgccgaccactttgccgctttccagacggttgatgccgacatcgaccacaatcgccccttctttaatccactcgccaggaataaagcccggtttgcccaccgcgacgatcagcaggtcggcgttttcgacatgatggcgcaggttttttgtaaagcggtgggtgacggtggtggtgcagccggccagcagcagctccatgctcatcgggcgaccgacgatattggaagcgccaatgaccaccgcattgaggccgtaggtgtcgatattgtagcgttccagcaaggtcacgataccgcgcggagtgcacggacgcaggcgcggcgcgcgctggcacaggcggccaacgttgtaaggatggaagccgtcgacgtctttatccggcgcgatgcgctcgagaactttgacgttatcgatccctgccggcaggggcagctgaaccagaataccgtcgatggtcttatcggcattcagagtgtcgataagctccagcagctcggcttcgctggtggtttccgggagatcgtaagagcgggagacgaagcccacttcttcacatgctttgcgcttgctgccgacataaatctgcgaggccgggttgctgccgaccagcacgacggccagcccaggggcgcgttttccggccgcaacgcgagccttcactttttccgcaacctcagagcgtacctgctgcgcaatcgttttaccgtcaataatttttgctgccatcagagagaggattccatctgtatctttacgaaagggggatgaggatattttgtcagaagcgggcctcgctgtcagtcctcgtttgctgttttatcctgtctgaggctaatttagcctgttatgaccatggttattacatggttattggtgcgttgcgcctggccactgagtcgatttacgcgcgcattaggcccggcggtatgcttcttgtacagttggtggaggatatttcgccagcgtcgtataagccccgcagtttcctggcaaaatggattgactcaaccgacgtggaccgtataattccacgcgtttcactccgcgaagcactcgcttctcagggcgcccttagctcagctggatagagcaacggccttctaagccgtaggtcacaggttcgaatcctgtagggcgtgccatttaataatcaatcacttatcaacttcctccagtcgctgatttttccttgtgggacatatttgggacatcttctgcaaaaatttgcaaaaaatgagtcaatttgacgtgcgtgctcagttaaatggttaggtgccaggtgagcatatcgacggagcatttcgatgattctaatgtcttgtagtatctgtcggacgatggccagtcagagtacagcattactgctctgtaatatcgaacagaatggttaatgctggttatagctgagtgcagaataagcgctctgcaggaatgtgaaaatatgttgccggtaacaggctaatagtcattatagctttaggttctgtctgactgggttaaatatcgcattttaagctggcgtgaagtacagttgttatagatcaatattgaacactatttgaaagcataccctcgatgttcatccactgcctggaaagatccgaatgaacatcaaattcgtcgccatctccgtattcgctgttgtgtgcgtctttgcatcagatatttccatcgccaaatcgaattccttaagcgatgatcaggtcagtcaaaggattattgatgactctgtcgcatcctaccccggtacttgtgcctgtcccttcaataccgcccggaacggcagctcgtgcggtggccgcagtgcctggagcaaagctggtgggtactcacctatttgctacaagaaagaggtaacaaaggagatggttaaggcgtggcgacaagagaatcaatgataacgatcaatatctgaaccaggtgattacttacactggaatagttgtttaaataatattaaatgattatttcgaatactgcagcccatttgcagtaagcactgttctggtagaggcggcagaggccacggcgtatatctttttaccttgtgatatttgaacccagcaaatctatttcccctacctgatagacttagtgtcaccgtatcctgttactaagagcacggggctacctactcataagacacttcctcttcttacgaggaaaccggttcagcgtgttgtgtgtggagacagtacccatcaactcaaactgataacaaaaagtttaatttttttccccgccgcgctgactatagttagggcactttcacttgcccaataaggtcacgattatgaaattagttatcgcctccgtaatttctctgctcagcttcagcgcgctggcggcgccagaggggacgctcagcgtacacattcttaatcagcaaaccgggctcccttcaccgggggtgcagattgagctggataaacagcagggggagagctggcagcatatcgccaccggtaaaacggatgccgatgggcggattaaatcgctctatccgcaggcggagaatatggagccgggggtgtataaagtgacgtttaaaaccggtgactattttaaaagccaaaatatgaatacgttcttcccggtgattccggttattttcaatgtcacaaagcaaaatcaaaaactgcatatcccgctgctgctcagtcagtacggatactctacctaccgcggcagctgatgacccaagccgctatccagccaacgcctgcgcggcttccgcaggcgtcacacttttctcgcaccacgatgtccacgcctaacgctcggtctctttctctttaaagtgtttaacggcttcgtcgtacatcgccagcaggccggaaatttcgccttcatattgcggcacgcgctgggcgcgaacgagctcaatcagcagcgcataggctgcttcttccggggccgcatgtggattaataagtccagacatatcacctccttaacagtgggcctttagcctacccctcggcgggaaaacgcaacagcctgatatgcaaccagtacttcttatatggctcttgtgaaacctcagaggcgaagaccacggcggaaatcaattgaaggaggggttatccagaccactggcgtggcgattagcggtgcatctacaccggcaggaggctcatcatcagccaggcgatggcgatgcagataagggtcatcgacagcacaaaattcatggtagctcctcttcatcctttctttactcgccgtaaattttgacagtgatgatcgcctttatccttggcgatttgtgccgctatccggcggtgggctggggaaagacggcctgtttccccgtgaaggccagcaaaatatcctctttgtcagggttatagtgatgacatcaatgaataagcggcatcacattggttatgttggtctttccgcctgaagaatgacttcaggtcgctgataagcttgctgggggactaacaggatgagcactacaccgttaacgctttcttttgccggacaacaaccgcccatcgccctgccgcaggtgccgggaacgcgggggccggtgggagtcgatatgcgcgggctaaatcagtccggattctgcagctatgaccccggcttcgccaataccgccggatgccagtcggcgatctcgtggatcgatacggaaaacagcgtgctattgcaccgcggctatccggtggatcagctggctcgccagtgcgattttctcgaagtggcctacatcatgctgaacggtgacgcgccggatgaggccagctatcaaacctttcgcgagaccatcacccgccatactctggtccatgagcagatagcccgcatgtgcagcggctttcgtcgcgactcgcacccgatggcgctgatgtgcgccctggtgggggcgctggcggcgttttatcatgacgtcctggacgtggaaaatccgcagcaccgggcgctggccgccacccggctgctgtcgaaaatgcccactatcgccgccatgagctacaagtacaccattgagcaacccgcggcgtatccgcgcaacgatctctcctatgccggtaatttcctgcagatgctgtttgctatcccggcggaaaaatacgttctcaatccggttatcgagcaggcgatgaaccagatcctggtgctgcatgccgatcacgggcagtgcgcctcgaccactacggtgcgcgcggcgggctcctccggggcgaacttattcgcctgcgtcgccgccgggctggcgtcgctgtgggggccgatgcatggcggagcaaatgaatcgagcatgcgaatgctggaggagattgaaagcgtcgatcaggttccggcgtttctgcgccaggcgaagcgcgatccgcaggcatttcgccggctgggttttggcaactcgcgctaccgtcaccgtgacccacgcgccgatatcctgcgtgaaaccagccatcgggtgctggcggaggtaggcatgtccgaccgcctgctgcaggtggcgatggcccttgaggacgtggcgctgaccgacccctattttgtggacaatggcctgtcgccaagcgtggatttctataccgcggtgatccttaaagcgatgaatctgccttcgtcaatgtttgcggtggtcaccgcggtcggtcggacggtcggttgggtggcgcactggaacgagatgcaccaggcgccgctgaccatctaccggccacggcagatttacgttggcgagggctatcgggattacgtctcccgacgcggcgagcggtctgctgagctaaggtaatgccttacaggcaggaggcgcgcggcgtcttcctgcccaggcgggttactactcagagatgccgggagagcagatagtgctcgacggcggtatattcggttaaccgggtatacagcgccaacagggcgctgagaaaagcgcctacctcacaggcctgcggcctgggcgtggcgagtaatggctgtagcgtagctctcagttgatcaaggtcgggcttcagcacatacggtatatgcagggtgctgaggatggtttcagtctgctggaaatcatgacgagatggcaacgcctcgtctgcgcttagccagctcaggataatcaacatgaggcgatttttagcgtagagatacgatttcatggcctgtctcctgtcggtagtggcgcaacaccatcccctgaactttgttcatcagttccacgttatttttcaccgccagcttgctaaggacgcgtgaacggtagtagtagacccgtttgatcgtgagctgcatggtgctggccacgtgacacaacggcattccccccatcagcaggctgattaaaaaagtttccttacgggtcaggttatagctgtcaggtatggcgatatagagcttgtcggcggggggcgatgtcaagcgcggaccgcgggcaagggcagcgctgagcccggcaaaactggtgatgaactctgcgccgagcacaatggcgaggctgcgttcgagctcgctcaacgggtagcctgatttggcaaaaataaagatccggatcaggggattaaacgattttaaactgagcgcgacctgcagtacttcgatgctgacgctgctgtaatcaataaggatggtgcttagccgggctccggcatcggtcgcaaaaaaagtatagaacatctcactctgtccactaaacgggtaacagagtatttctttaatatccagaggcttgctgtttggttcattaatatacgctttcagggcaatattaaaatattctgaatccgcaatgcagatcaacataatgacctcctggcataaatacgctgtgcatgctgtcctgcctgattcgacaatttactgtagagaatacccacctgaaataacatactccctgcgctttcaatccaggggggagaacgtgggaggaggtggttaataatgaggatgagatagttagatcgcatttctcgaatgttctttagaaaataaaaaataaaaattaccttttatttacagtgagttgtgtttttattgtgcgtcagttttatttctttttcaaagtggtgttaagacttttctataaaaagtagaaatggtcctggtggcgaatttgaataataaataatgaagtgagtaggatgtcagtgcagggaaggggttaaaagataacaggttaatccaatggactgagcattaataaattgtacgtataaagtacgccagggtatttcctgaacgattctccataagcgtggtgatgaggagtgaagatgaaaaaatacagcagaggaatggcatctttcgtggtgatgatgatgctttctccggtagcggcacaggctgctgatggcaaagtcacctttaatggtgaagtcatcgaaaatacttgtacggtagtgaataaagacaagacggtaaccctaccgacggtccagcgttcagcgctcagcagcgcgggtgaaacggcgggcgtggttcccttcaccatcgatctgacgagctgcaccccaggggctgatgtctcggtgtacttcgagaaagatcaatacgtttccacggagggtcgactaaaaaacactctgtctgacggcacggaagcagaaaacgtcgatgtggagctgctgaacactcggtttacgccgattaacctcgcggagaccccggcggtcgctgcagacggcaccattgctcgcccggacgtgatcccggtggcggtggctgagcaggatggttccgcctcgctgcctttctatgcccgctactatgcgaccgacgccgctacggctggaaaagtcgctacctacgtcaactttacggtggtctatccgtaacccctgtccacggccccgctcaggggccgtttatccacccggcaaggaggaggtgaatatgcggcgtatggttctggcactgctgctgtccagctatttaccctcggcggacgccagtatggttattgacggcacacggattattttttccggcgacaaaaaagagatcgccgtccgggccaccaatatgggggagaccccctctctgacgcaggtctgggtcgacgatggccgcgtgcaaaatcaaccggaaaaggatgcggcgccgtttattgtgctgccgccgattgtgcgcatcgaaccgggaaaaggccagagctggcgcctggtgtttaacggcagccgcctgccgcaggatcgggaatcgctgttctggttcaatcttctggatatcccacctgagccgaaaaatggcaagactgacaattacctgcagctcgcgatacggtcgcgtatcaagctgttttaccgtccggcaggcgtggcggcggaaaaaatagccgcggaaaaagccctgagctgggcgctggctcctacgggcaacgggttgcgggtgagcaatgcctcagcgcgctatatcaccatcgacagcatcacccttaacggacaaaaacacgctgccggcatggtcgccccgttttcctcgctggagatcgcgcctaaaggggtcgcgctgcgcacgctgccagccaaattcagcttcaccaccatcaatgattacggcgcggtagtgaatcataattatcctcagtaaggacattattatgaaactcagggagatcaaggttgggttgatgctgctccttccctggcaggaggcatgggcggcagaggcgtttagttttaaccgcgcccatttgcacggcgccgcgcaggttgatctccagaaatatcaatacgttaatccactacacgccggacagtaccgcagcacgctctcggtgaatggccgggacctgggggaagaaacgtttgttatccaggaacacgatggccagcttgagccctgcatctcaccctcgctgttcgacgctctgcagctgaaggatgcccagtggccaaccgcggccacctgcctgcgtttttcgcagatcgataaggcgatcggctgggagtatgacagcggggaaaacgtcctgcgggtaaatatgccccaggcgctgctgcaaccccattatcggggggcggtgaacctgaagaaggtggacagcggcgtgcccgccgcggtgctgcgctatcaggccaacagctatcagagcatcgtcgacggggatagcagcagccatcattatctcgggctggatgccagcctgcgcgcctttggctggcggttacatcaccagtccagctaccaggcgcaggaagggaatacgcactgggatagcattgccacctgggctgagagaagtgtagtgaactgggcgtccacgttacggctgggtcagggatggaccgacggaaccttctttgacagcgtcagttttatcggcggcaggctggctaccgatgtgcgcatgctgccgggctctcgccgcggttttgcgccgtcggtcagcggcgtggcgcgcaccaacgcccgcgtaacggtcacccagaacggcgccctgttgtacgaggcaacggttccgccgggcaaattcaccttcgacgatctctatcccaccaacgccggcggcgatttacaggtgacgatccacgaggcggatggcagtcaggacacctttaccgtgccgtacgccacgctgcctggcctggtgcgggcaggcgcggtctattatgatctgtcgctgggctatctggatgaggacgggatcgccgggcggccgggatttggcgaagccacgctgcagtacggcttcaatgactatatcagcggctataccggcgctaacgcgacgacagattattactcgacgctggtcggcagcgccttcaatacctactggggcgcgctggcggtcgatctttcccgttctgcggcgaagggcagggagcacggctggcaggagggctaccgctggcgggtgtccgcatcaaaatcgtttacatccgatacgcgaatgctgctctcaatgagccacagcaacgacggcaattatcgctccattcgcgatgccgcctgggagcacgaccggcaccccaacgactggcgggagatgacccgctacagcgcgacgttgtctcagcaggccggcagcggcagtctgtcatttaacggaatctggagtgaggatgtccgccaccaccgctggcgctcatatcagctgggctatgccaaccgctatggtcagctcaattattatctgtatgcccagcagagccaggatatccatcaccgcaataatcaggtggtgggcgtctccttttcgctgccgttcgggcaggcgggcagcctgaccacccgctttaaccacgataaaaactacggcagccagctgcagtccagctataccggcagcgcaggcgagaaaaacgccttcagctacggtttgaccgccagctacgacatgccgcgggagaacccaaatgaagccagcgttgcggccaacggtagcctgcggacggattatgcgtacctgaacgccagcgccagcgccggtcgccatcagcagcagtactcgctgggggcgtcgggcgccctggtagcgcatcagggcggcatgaccgccacccccgaactgggggaaaccttcgccattgtggaagcgcccggcgcggtgggggcccgggtggctaaccgccctggacagccgattaaccgccagggttttacgatcatcccttacctcgatccctttaccgctaactggctggatctcgatccgcagggtctgaacgaccatgtggagattgtctccagcagcacgacggtggtgcccgattcgggcgcggcggtgaaggtcaaatttgtcacgcgtaccggctatccctggtttgcccatgtcacgctgccggatggcgcggcgcccccgctgggcgcggaggtgttcgacgacaacggtcgggcggttggcgccgtcggtcagggcgggctgctgtatgcccgagtgccgcaagaccacggcagcgtctcggtagtatggggcgaacgcagcgggcaacgctgccggttggcctatgtcatccgcgacgacgcggtgcagcaggttagcagcggcacgccgcatcaggtctgccggccgggaataaaggagaagtaatatgaaaaaaatcatcgcatcaggggtacctcttctgctggccggcgggtactgcgcttcgctgtcggcagcgtgccagatggtcagtggcaaaactatcgagtattcagtgaacgtcagccaggccagtatcaaccttgacgtcagcgatctccccatcggctccctgctatacagctacggagggatgattatcactaataacgaacgctgggagatcgcctgcagcggcagcgagcccggcgggtttcagagcattggcggttcccgggtcggcccggcgggagacggcaagccgggggatatctacagcatcgaccgcctgccgggcatcggctacagctttcagatgggggaacaggatggcattaatttcgatcccctgttcacggcctggccttccgcgccggtattttccggccagcgcgcatttcaggcggagaataaaaaaccgaccatctatttctggcggattgccgataacggcggtctaccgctgccgggcgaatattgccttaatgattaccttggcgatatttatcttggcggagtacaggcgatgcgcttcagcgtcagcgggctctgtattcaggtcaaatcacccacctgcaagattactgacgacagtaaaaacattaacgtcttcctcggacggcataacaaaaccgcatttaccgggctcaacagcaccaccgccccggttccttttaacatcaacctgacgaactgtgaaaatgtcggcagcgtgtttatgcagtttaacgcgacggtggacagcgctgtcgccgccaacgaagtgattaaaatcgatgaccaacctgaaggggcatccggacttggcgtgcagatcctcagtgccggcggctcgctggtgccgctaaaccaggtgagccaggtctggtccgggaaaaaaggcagtcagacgaactatcgtttatcctatcaggcccgctatatccagacgcagcccgcagtgactgcgggcgaagcgaacgccagcgtgaccttcgtggtgacttataactgatctgcctggcggcacagcgccgtcaggcatgcgccagtaaaggaaacatcaacttcctgtctttaaacaggttttccttctggtcatagacgaagaggatatcttctccctctatcttctcatactcgccgagccggtcttcactgggggtaaaaccgaggatggcctggtaaacgtggtcatcggccagttcgttgaccagcgtcgacaggctcttgcccacgtcgcagaatagatcaaagcagatcagcaccggaccgttttgcatggcgatgaccaccgcctcattttttgccgagtaatagacaaaatgcttcataaaggctgagcagtaaaacatcagcaggccaaagttatgctccacccgcagcggtgagaacgggttggatttttcatagtaatggcggagcagggcgacatcgtcagggctgtccatatccagtttacgaaaatcaccggctcgcggggagaccggcataatatattgatactcttcgctgcgggtgaagccaaatttggggtaaaaatccaccgtggtgggattggcgaataaaaagaaggcgtccgcctcctgctgccagtcctgcaggatgtgatggataagctggccggctaatcccttattacggtggtccggctcggtcatcacggtgccaatctgaatataacgccggggctcgccctgccagcgcaggtcgatgatgttggccgaagcgttagcgataactttattgcgttcgacaaaagcataggggatataggcgtcggtccagtaaccttgctgataccactcttcaaaagacaggtcaaaagtcttaacggcaaggtcaatgaagctttttcttaatgggttattttctctgacttgcttcactaattgataattcattgtcatagttccttctcactatggcttctgaaagcggcgacgtcggcaaaggcacttgcgtcgaatgagcgctgtaaacgtagcatatctgggaaaaggatccgcaatgtcgatgcttaacctttgccccagtcacaaataaccgcatgctggccgtgtcaaaccgggcgaaacggactgtttgcgttcgctatcgccataataaagcgtgagtaaaagaggtattggtcgagaggctgaggcaaatgtactggctattttatcgacaatcggccgagccgtagaggttaggtttatttatttatgcattaaacaggaaattttacgcgttgcgtctaataatagagtagtccccagcgtaagggctgaatttatcctggaatcggcttataataacgcgctttgtgattgagtattaccgcacgaattggaaaaatactacgtgcaggatccgctactttatttcgcggtttttgctcagctattattgagtgaattaacaggattactatgtcaaatttacccaaattttcccgcgcgctgttgcacccgcgttactggctgttgtggctgggaattggctttttgtggctgctggtgcaattaccgtatccggtgatctaccgtctgggaacggcgcttgggcggctggcaatgcgggtgatgaaaagccgcgcgcggattgccagacgtaatctcgaactctgctttcccgagatgagcgccgccgaccgcgaggcgctgctggtgaaaaactttgaatcgctgggcatggggctgatggagaccggcatggcctggttctggccgacgcaccgggtagcgcgctggaccgagaccagcggcgttaacgaggtggtggagcttctggaagaaaagcagggcattttactgatcggtatccattttctgaccctcgaaatgggtgcgcgaatgtacggcatgtttaccccaggcattggcgtctaccggcccaacgataacccgctgattgactggctgcaaacctggggacgcttgcgctctaacaagaccatgctggatcgaaaaaatctgaaagggatggtcagggcgctaaaagagggggaaattctctggtacgcgccggatcatgactacggtccggccagcagcgtcttcgccccgctgtttgccgtcgaacaggcggcgaccaccaccggtacctggatgctggcgaaaatgtccggggcgacgattgtgccgtttgttccgcggcgcaagcccaacggcatggggtatgaattgatctccctgacgccggagcgcacgccgccgctggcgagcgccgaggttacggcggcctggatgaatcagattatcgaacagtgcatcctgatggcgcccgagcaatacatgtggctgcaccggcgctttaagacccgcccggaaggagtaccgccgcgttactgaacgcctcggccaaaaaataagcgcatcggtagcacgcttagtaagtcgccgtctatactgaaagggcctgactgaaggctaattccaaggagattgcaggatgaaaaaagtgatagtcgcgttagccctttccgccgttgcatttggcgcctccgccgcgcagttgattaccaaagaagaagtgaaacacttcaaactgaccaaagtcgggccgatctcggtggggccgtccggtggcgaattctcttcgccttccgatctgcacgatcagctctccaagctggccgatgagaaaggcggaaggtactacgtgatcaccgctgcgcgtgagcatggccctaactttgaagccacagcggaagtgtataaataacctttttttaaagcgtgccgtatcggcgcgcaacgcattgagcctggagcgcgttaagcctccgggcttatttttttctgctatcggaattgccttaggcaatagcggcagcggaaatgcgtttttatcgctatatatagatttcatgatcacgatgttaatgaattattgctttttattgttaataaagagccaattccggcctaatgcctgagggagtgacccctggcaaaaataggtaggacaaatgtgttatcatcgcgcctttccctttttgtctggggctttcttgtatgctacaacctgttgttcgcgtcggtgaatggctggtaaccccctctgtaaaccaaatcagcaggaaggggcgccagcttacccttgaaccgcgtttaatcgatcttctggtcttttttgcccgccatccgggggaagtgcttagccgggacgagcttatcgaaaacgtctggacccggaacgttgtgaccagccacgtcgtcacgcagagtatttctgaactgcgcaagtcgctcaaagacggcgacgacgttagccttgagtacatcgcgacggtacccaaacgggggtataagctcacggtgccggtgatctggtgcaccgaagagggggaggagctagccccgtcgatggaggcgctgacgccttcgccgtcgaccgccgttcctgcgccgccggccgccggtgcgccatccgacgtctctgtccctctccctgatgccgccgcgccgccaccggctcctaccgtggccagcgcgccgtcaggccgcaagcgcctcactaccgccctggtgtgggggctgttcctgttggcgctgggcacctgcgtggcgctggtggcgctgtcgagcatggaatcgcggccgccggtcaacaaggcgcgtctgctgctcaatccgcgtgatatcgatatccacctggtgaatggcaactcctgcgctaactggtcgtcgcagcactcctacgccgtaggactggccagcctgatcaccacctcgctgaacaccttctcgacctttatggtgcatgataaaacggactacaacatcaatgaaccaagcagttccggcaaaacgctgaccatcgagttcgttaatcagcgccattatcgggcgcagcagtgctttatgtcggtccagctggtggacaacgccgacagctcgacgatgctggataagcgctactttgtgaccaacgataaccagctgaccatccagaacgatctgatgaacagcctgtcggatgccctggcgcagccgtggccggcgcgaatgcaggcgatgctcaggcaatatcagccctcgcaaagcgtggcgttaacctatttctaccagtcgcatcagctgttaatgaagggcgacgtcgattcattaagtaaggccagtagcctgctggatgatgtgattaagcgggcgccggattttatttacgcctatgccgaaaaaacgctggtggatgtattgcgccattcacaacagccgcttgacgataaacagctggccgccctctacagtgaagtcgagcgggtaggggcgatgccgggtataaaagacatggcgatttattatcaaataaaagcggtggattcattggggaagggcaaagtcgacgaagcaaataccgcaattaatagtgcgattgatttagagatgtcatggctaaattatgtgctgttaggcaaagtctatgagatgaaaggtgagaaccgtctggctgccgattcttacatcacggcgtttaatttacgtcctggcgaagataccctgtactggattgaaaatggggttttccagacgtcggttaaccgagtagttccatatctcgacaactttctctcttcagaataagtaaaccctcatcatgtgcaaggttttgggcatggtgaggttaaatttatgtttctcatgaagcctcttgttgttatttttatttagcattcaggaggctttaaataacagtcaggtaacacgctctgcttctcgtaagtctctgtaatgcaacggtgtttatctttttctgacaccctgttgtcatgtttatatgttaagcgaaaaaggtcaaaatatcatttgtctgatgtttgtttttatatcactttatctttaggacttatctcgtacaaatcagtaatcttgttggcagttggtcgggtcaattaatggttctgtatcatgatctgtacctcccaaataaacttaggagaaaaacaaccatgagttctgccaagaagatcgggctatttgcctgtaccggtgtcgtcgccggtaatatgatggggagcgggattgcattattacctgcgaacctggccagcatcggtggtattgccatttggggctgggtaatttcaattattggtgcgatgtctctggcttatgtttatgcccgactggccactaaaaacccgcagcagggcggtcctattgcctacgctggcgaaatatctccggcattcggtttccagaccggcgtcctttattatcatgcaaactggattggtaacctggccatcgggattaccgcagtttcttatctctctacgttcttcccaattttaaataacccggtgccagcaggtattgcctgtattgccatcgtgtggatctttactttcgttaatatgctcggcgggacctgggtcagccgtctgaccaccattggtctggtactggtgcttattccggtagtcatgaccgcggtcgtcggctggcactggtttgatgtcgctacctatcaggcgaactggaatacctccagcaccaccgatagccacgcggttattaaaagtatcctgctctgcctgtgggccttcgttggcgtagaatccgccgccgtgagtaccgggatggtgaaaaacccgaaacgtaccgtgccgctggcaaccatgctgggtaccgcgatggccggtatcgtctacatcgccgcgactcaggttatcgccggtatgtatcctgcttctcagatggccgcgtccggtgcgccgttcgcaattagcgcctctaccatcctcggcggctgggctgcaccgatggtatccgctttcaccgcctttgcctgcctgacttctctgggctcgtggatgatgctggttggccaggccggtgtgcgtgccgccaacgacggtaacttcccgaaagtgtatggcgaagttgataacaacggtattccgaaaaaaggcctgctgctggccgcagtgaaaatgaccgcgctgatggtgctgattaccctgatgaactccgccggtggtaaagcctctgacctgttcggcgaactgaccggtatcgcggtactgctgaccatgctgccttacttctactcctgtgttgacctgattcgtttcgaaggcatcaacatccgtaacttcgttagcctgatttgttcggtactgggttgcgtgttctgcttcatcgcgctgatgggcgcaagctccttcgaactggccggcaccttcatcgttagcctgattatcctgatgttctacggccgcaaaatgcaccagcgccagaacaacgcatcggataacaacaccaccgctaacgcgcactaatcagtaacccgttttcctgaggctccttccatcacctgtcatcacgcgacgggaggggctttctacatctggagatttgactatgaacgttattgcaatcatgaatcacatgggggtttacttcaaagaagaacccatccgtgaactgcatcgtgctctcgaacgcctggacttccgtattgtctacccgaacgaccgtgacgacttattaaaacttattgaaaacaactctcgtctgtgcggcgtgatcttcgactgggataaatacaatctcgaactgtgcgaagaaatcagcaaaatgaacgagtacatgccgctgtatgcgttcgctaacacctactccactctggacgttagcctgaacgatctgcgcatgcaggttcgcttcttcgaatatgcgctgggcgctgcggaagatatcgcgaacaaaatcaaacagaacactgacgaatacatcgacaccattctgccgccgctgaccaaagcgctgttcaaatatgtccgtgaaggtaaatataccttctgtaccccaggccacatgggtggtaccgcgttccagaaaagcccggtaggcagcatcttctatgatttctttggctccaacaccatgaaatccgatatctccatttcggtttctgaactgggttccctgctggaccacagcggcccgcacaaagaagcggaagagtatatcgctcgcgtgtttaacgcagaacgcagctacatggtgaccaacggtacttctaccgctaacaaaatcgtcggcatgtactccgcgccggccggcagcaccgtgctgattgaccgtaactgccacaaatcgctgactcacctgatgatgatgagcgacattacgccgatctatttccgtccgacccgtaacgcctacggtatcctcggcggtattccgcagagcgaattccagcacgcgactatcgccaagcgtgtgaaagagacgccgaacgcgacctggccggtacacgcggttatcaccaactcgacttacgatggtctgctgtataacaccgacttcatcaagaaaaccctggatgtgaaatccatccactttgactccgcatgggtcccttacaccaacttctcgccgatctatgaaggcaaatgcgggatgagcggcggccgcgtcgaagggaaagtgatttacgaaacccagtccacgcacaaactgctggcggcgttctcccaggcgtcgatgatccacgtgaaaggcgacgtaaacgaagagaccttcaacgaagcctacatgatgcacaccaccacttccccgcactacgggatcgtggcgtccaccgaaaccgcggcggcgatgatgaaggggaacgctggtaagcgtctgatcgatggctctattgaacgttccatcaagttccgtaaagagatcaaacgtctgaaaggcgagtctgacggctggttcttcgacgtctggcagccggagcatatcgatggtcctgaatgctggccgctgcgttccgacagcgcatggcacggtttcaaaaacatcgataacgaacacatgtacctcgacccgatcaaagtcacgctgctgacgccggggatgaagaaagacggcaccatggatgacttcggtattccggcaagcatcgtggcgaaatatctcgacgaacacggcatcgtggtagagaaaaccggtccgtacaacctgctgttcctgttcagtatcggtatcgataagactaaagcgctgagcctgctgcgtgcgctgaccgacttcaaacgcgcgttcgacctgaacctgcgggtgaaaaacatgctgccgtcgctgtaccgtgaagatcctgaattctatgaaaacatgcgtattcaggacctcgcgcagaacattcacaaactgattgagcatcacaacctgccggatctgatgttccgcgcgtttgaagtgctgccatcgatggtgatgaccccgtatgccgcgttccagaaagagctgcacggtcagacggaagaagtgtatctcgaagagatggtcggccgcgtcaacgccaacatgatcctgccgtatcctccgggagtgccgctggtgatgccgggtgagatgatcaccgaagagagccgtccggtgctggagttcctgcagatgctgtgcgaaatcggcgcccactatccaggcttcgaaaccgatatccacggcgcctatcgtcaggcggatggtcgttacaccgttaaagtgctgaaagaagagaataacaagtaatagacgcacaccagggaagtggcttgccacttccctttttcacgctgcaaggagaacacatgaaaacaccctcacagccgcgcgcgatttactacatcgttgcgatccagatctgggagtacttcagcttttacggcatgcgcgccttactcatcctttaccttacccaccagcttggcttcgacgacagccacgccatcagcctgttcagcgcttacgcatctctggtttacgttacccctattctcggcggctggcttgccgaccgcctgctcggcaaccgcacggcggtaattgccggggcgctgttgatgaccctcggccatgtggtgctgggcgttgagtcgacctccgcatggagtttgtacgtcgcgctggcgatcatcatctgcggctacggcctgtttaaatccaatatcagctgcctgcttggcgaactgtacgctcacgacgacccgcgtcgcgacggaggtttctcgctgctgtacgccgccggcaacgtcggctcgattgccgcgcccatcgcctgcggactggcggcgcagtggtacggctggcatatcggcttcgcccttgcggggatcggtatgtttatcggcctgatgattttcttaagcggcagccgccacttccgccatacccgcggcgtcgataaaccggcgctgcgggcggtgaagttcgtgctgccgacctggggctggctgctggtgatgctctgcctggcgccggtatttttcacgctgctgctgcaaaacaactggtccggctatctgctggcgatcgtctgcctgttcgccgcccagatggtggcgcggatcatgatcaaagccccggagcatcgtcgcgcgctgtggcagatcgtcctgctgatgctcgccggaacgttgttctgggtgctggcgcagcagggcgggagctcgattagcctgtttatcgaccacttcgtcaatcgtcgtctgctgaactgggacgtgccgaccgcgctgttccagtcagttaacgcgatagcggtgatggcggccggcgtggtgctggcgtggctgatgcgcccggaaggcagcgtgcgttctgtgctgcgcgtctggctgaaattttctttcggcctgctgctgatgggcggcggctttatgctgctggcgctcaatgcccgccatggcgcggctgacggtcaggcctcaatgggcatgatggtcgccgggctggcgatgatgggctttgccgaactgtttatcgacccggtggcgatggcgcaaatcacccgtctgaacatgcccggcgtcaccggcgtattgaccggcatttatatgctggccaccggcgcggtggccaactggctggcgggcgtggtcgcccagcaaaccaccgaatcgcaaatcagcgatacggcgattgccgcctatcagcatttcttcgcgcagatgggcgaatggactctcggctgcgtggcggtgatggtcattatcgcctttgccgcggcctgtagcgtcggcaaacgtcgtgcggctgccggtgaaattaccggcggcggcgcctgacgctcgtcccggctcgtggcgtaaacactttgtccgggccgcgattcgtagccccggtaagcgcagcgcgaccgggggcattacctcaacagcggagcgcgaagtcgctccttgcacagcttagtgaacagtaggaggatattctggcatgcgcggaggccaacgataaaaaataccgttactgaagccatagctgagtgagatcagcttggagtgaatccaggatcgttaagattgtgctctggtgtcttcccagagacaggccgcgcggaagggtgacctggttcaatttatcgaagctagtttgaaagcaaggttatgaggaatccatatgtctgaacaacaagcacaaggtgccgatgaggccattgaccttaataatgaactgaaagctcgtcgcgaaaaactggctgcgctgcgtgagcagggcgtagctttccccaacgatttccgtcgcgatcatacctctgaccaattgcatgctgaattcgatgcgaaggacaacgatgaactcgcttccctgaacgttgaagttgcggtggctggtcggatgatgacccgtcgcgtgatgggcaaagcctccttcgtcaccctccaggacgtcggcggccgcattcagctgtacgtggcgcgcgatgacctgccggaaggcgtctacaacgaacagtttaagaaatgggacctcggcgatatcatcgccgcccgcggcaagctgttcaaaacgcaaaccggcgaactctcgatccactgcaccgagctgcgcctgctgaccaaagccctgcgcccgctgccggataaattccacggcctgcaggatcaggaagttcgctatcgccagcgctatctggatctgatcgccaacgaagagtcgcgtcatacgttccgtatccgttcgcagatcctcgccaccatgcgccagttcatggtggcccgcggctttatggaagtcgaaacgccgatgatgcaggtgatccctggcggtgcgtcagcccgtccgttcattacccatcacaacgccctggatctcgatatgtacctgcgcatcgcgccggaactgtatctgaaacgtctggtggttggcggttttgaacgcgtgtttgaaatcaaccgtaacttccgcaacgaagggatctcggtacgccataacccagagttcaccatgatggaactatatatggcgtatgcggactacaaagacctgatcgaactgaccgagtcgctgttccgcaccctggcgcagacggtgctgggcaaaaccgaagtgccgtatggcgaccaggtgtttgatttcggcaagccgtttgaaaaactgaccatgcgggaagcgatcaagaaacaccgtccggaaaccaacatggcggatctggataacttcgacgcggcgaaagcgctggcggaatctatcggtattcaggtagagaaaagctgggggctgggacgcatagttaccgaaatctttgacgaagtggcggaagcgcatctgattcagccgaccttcatcaccgaatacccggcggaagtttctccgctggcgcgccgtaacgacgtcaacccggaaatcactgaccgctttgaattcttcatcggcggccgcgaaatcggtaacggtttcagcgagctgaacgatgccgaagaccaggcgcagcgcttccaggatcaggtgaacgccaaagcggcgggcgatgacgaagcgatgttctacgacgaagactacgtgaccgccctcgagtacggcctgccgccgaccgccggtctgggtatcggtatcgaccgcatggtgatgctgtttaccaacagccataccatccgcgacgtgatcctcttcccggccatgcgtccgcagaagtaatccgttgcactccctcccggcctgcgccgggaggttctgtctgcattatccccggcctgtcggcagagcgatgttattacaggactttttgcaacgtgccgcgctggctgccgtttgcccatacgccgttaaaggcgtcgttcagcgtaaaggctgagcttttcacccggaaggtcagtttaccctggctggctttcgccgcctcaaccagatggccatgggttttcaccgttttagcggtgacggtaatctcatcaattttatcgccatactccgtataaacataccaggtgcccacccaggggccgaagccgctatcggcgtgctgtgcggcggcggcattctcggctttggttttatgaatatcgcaggtgatcccgtcggtcatctgcgtgcagccggaacgttcaagctgttcccggtatttcgcgctaatggcgtgggccggcgcggcggcgaccagcgccagggtgagggtggtgaaaagccaggtcttattcatcttattgtttctcatcgcgatagcggcgtgccgggccagagagagggatacacgttggtgtattctcccgttggcgtcagaataaaataacccaaccagtcctgataagtaattagcaagaggctctggggttatttattagtaaaacatcaaagtttcatgcttatttcgcaagccaaccttcccactgcttgtcatattattgcagagagaatgttaattatttgatgttttaaaagcggctatgtgtcattcaggcaaataacagcaggcctgtccttggcgcacggcaaaagcccgcgctggtgcggtgttgagtttttttcatattgctatcatcatatttcgaatgaaagggataacctctgaagcgggttattaagccagtaatttttatccgcaaaataagccggcggcaagcattatttccatttatttttcagggttacctgaaatagcgaatataccgccagcgcaatgatggatttccatcatttctccgttttcatcgtcggtcgtcacctgcttatagtgacgccagacaagaccacagggtggaaaggagaacaagatggcgacagagcaactgcggtggggcgtgagccccctgtgctggaccaacgatgtactcgaggatttaggcggtgatattcccctggatacctgcctgcgcgaggcgcgggaggcgggctatcagggcattgagttaggacggaaatttccccgccaggcagcaaccctgggctcgatgctggcggcggctgacctgcgcctggcgtccggctggtacagcggcatgctggccgaccgcagcgtggaagctgagctggaggcggtgcgggagcacgcccagctcctccggcagctcggtgcgaaggtgatggtttacggcgaatgcgggcaactgccaggtgaaaccccgcttgatgagcctatttcgctctcgccgccgttaagccgcgtcagcctggcggcgtattgccacaagctgaatacctttgccgacctgctgctgcgcgactatggcctccagctggcctatcaccatcatctgatgatgctggtggagcacgatgacgagctggagcggtttctgtctcacacccataacaacgtcgggctggcgtttgataccggccacgcctttgtcgccggggtcgagatcccgcgcgtactgcacaaatatggccaccgtatccgccatctgcatctgaaagacgtgcgtccgcaggtgctggggcgtctgtatcgggaaaacctgagctttaacgaggcggtgcgcgccgggctgtttaccatcccaggcgacggctgcatcgattatgcgccgatcctcgactttgtccgggacagcgactaccgcggctggctgattatcgaagccgagcaggacccggcgatggcgccgccgctggccaccgccagccgcgcctatgcctggctggcgcaccatttatcttccccttcatcgtcagaggagtacgcatcatgagcgcgcggttaaatatcggccttatcggctcaggttttatggggcaggcacacgccgacgcttaccgtcgcgcggcgatgttctatcccgatctgcccaagcgcccgcatctctacgcgctggcggatcaggatcaggcgatggccgaacgccacgcggcgaaactgggggcggaaaaggcctacggcgactggcgcgagctggtaaacgatccgcaggttgatgtggtggatatcacctcgccgaaccatctgcactacacaatggcgatggcggcgatcgcggcgggtaaacatgtctattgcgagaagccgctggcggtcaatgagcagcaggcgcaggagatggcgcaggcggcacggcgcgtgggggtgaagaccatggtggcctttaacaacatcaaaacgccggcggcgttgctggcaaagcagattatcgcccggggcgatattggcgaaccggtgcgctttcgcggcacctttgatcaggggttttataacgacccgaacctgccctggtcctggcgctgctcgaaaaccctcggcggcagcggggcgcttggcgaccttggcgcccataccctgtcggtcgcccagtttttgctgggcgggatccgcgaagtgaccgccagcgcgcaaacctgcctgcgccagcgtccggtgccgcagcgcgatgccgggtatgccagccgggtcgcggccgatgccgagtggcgggaagtagaaaatgacgatcaggttcagtgcctggtcaatttcgacagcggcgccgcgggggtgattgaggcctcgcgcatcgccgccgggcggatcttcggcgtgttctgggaggtctccggcaccgaaggcacgctgtatatggacggggagcgctttaacgagctgcaggtctatcgcttcaacgatgataaacatgaccgcggctttaagacgctgtatgccgggagccagatcccggcctatgccggcttcttcggcttcgattttggcggcggcgggctgggctattttgacgtcaaggtgatcgaagtgcatgacctggtgcaggggatttgcggggagggcgactgctatcccaactttgaatttggtttgcagaatcagcgcgtgctgtcggcgattgaagcctcgatggccagccgtcgctgggtgaacgtggttaaagactaaggagccgctatgtttccgtcacacttaccaaccccgcgccgcccggcggcgcagagcattcccatcctgcgctggggcattatcggtcctggctggatcgccgagcgctttgtgcactcattgaaaacctacagccggcagcaggtggtggcggtggcttcccgcagccaggcgaaggccgaccgggtggccgcggaatgggggatcccccaggcttacggccaggtggaggagatgctggcgcgtccggatattgatgcggtgtatattgcgacgccgcacaaccatcactttcccgacggcatgcaggcgctgaaggcgggcaaacacgtgctgatagagaaacccttcgccctcaacctcggcgaagggcgtgagctgcaggccgaagccgcccgccaggagaagctggcgctggaggcaatgtggtgcgattacgcgccgaaatatgatgtgatccgccagctgctggaggatggggcgctcggcgacctgcataccctgctggccgatcacggcgagtatttcacccgcgaccaccgcatcttcaatgccgatcttgccggcgggccgatgatggacctcggcagctatgtgacctcgtttgcgctgatggtgggcggcatgccgcaggagattgtcgcccgcggcagcgccacggcggaggggcttaacggtcagacgtcgatgctgtttagctggcagaacgggatgcaggggttgttaaacaccactttgttcagcaacacgccgggcggggcggtggtggccggacgccaggcgaccctgacgatcgacggccagttttacgcccccggcggcttcacgctcgccgccagccagggcgggcaggtgctgcgctgggaagagccgcgcaatcgctacgaccagctgttctggcaggcggagcattttgcctggtgcatcgggcaggggttgcaggactcgccgctgcggccgctcagtcgggtgctgcagaatctgcaggtgatggatgaggtgcggcgccaggtgggcgcggtgtttaacgaagaacgctaaggagccggccgggcattggtttgcagatagcgcgagcgtatctgccattgcccggcaaaaggacgcgtacgatgcctgatgtctgttgcccggcggcgctgcgcttgcacgggcctgtgatatctatgcaaccgattgatattacggtgtattaatgcctgtcttctgtaggccgggcaaggcatcgccgccgcccggcataaaacggctccgcgtcggctgttcttgcccggcggcgctgcgcttgcacgggcctacgatttcactgcaaccgtttgatattaaagcagattaatgcctgtgttatgtaggccgggcaaggcggcgccgccgcccggcataaaacggctccgcgcccgctgttcttgcccggcggcgctgcgcttgcacgggcctacgattttactgcaaccgtttgatattaaatcagattaatgcctgtgttatgtaggccgggcaaggcatcgccgccgcccggcataaaagcggctctgcgcccgctgttcttgcccggcgtcgctgcgcttgcgcgggcctgggatatcaatgcaaccgtttgatattacagtgtattgatgcctgtgttatgtaggccgggcaaggcgacgccgccgcccggcataacagcggctccgcacccgctgttcttgcccggcggcgctgcgcttgcgcgggcctgggatatatatgcaaccgattgatattacggtgtattaatgtctgtcttctgtaggccgggcaaggcatcgccgccgcccggcataaaggcaggtgcagcgcctgatagcggttgcctcgcacccgctcagcgacagtcgtcgacggcgacaaactggccatgctgcagggactgaaccgccgcttcggcaatggcctgcgcctgcaggccgtccagcaggccgggcaggtcggcgacggtttcaccattcagggagcgaataaaggcgtcaagatgctggtaataagatccctgtacccggctgaaccagtccggccacaggcccggctcaatgcgctgattgccgcgccacagggtagggcccgccggcgactggctaccggactccagcgcgccttcggcgcccagcagggtgatccgttcatcgtacccgtggccggtgcggcgggtattgtccagctgcgccagcgcgccgccgcgcatctgcatcatcaggatggaggtgtcgacatcgccaaattcggcaatgtccggcagggccagcgccgcgcccatcgctgctacggtgcgcacttcatcgccagtgagaaagcgcaggagatcgaagaagtggatcgcctgatcgcgcatctggccgccggagctgcgcagatagtcgagcggcggcatgctggaggcgcggcagaccatctgcaccagctcgacccggccgatcagcccttgctccagctggcggcggagctgctgatggctgctatcgaagcgccggttaaagccgacagtgaccggcacgttcagggggagcacccgctccaccacctcacgggcacgcgccagggagaggtcgatcggtttttcgcaatagaccgccttgcccgccctggcggcggcttccagcagttcggcatgcgacggggttgaactggcgatcagcaccgcgtcgatggcgtcgctatggatcgcctcgctcacggtcaccgcccgggcgccatagcgggcggccagcgcctgggcgcgctccggggcggcatcggccaccatcgtcagcgcacttccttcatgacgggcaagactggcggcatgaacctgaccgataaaaccactgcctaccagggcaaaacgtttgcagatcatttttttctccagaatggcgaggggacgctgccaccataatcggtttgctaaactcactgacactgccgttttgatggatttccatcatgaagagaggggcgatgaaaaacatttcactggcgatgctggccagacagattggcgtcggcgtggccaccgttgaccgggtgctgaacgagcgcggcggcgtatcgccgcagaccacgcgcaaagtgctgcaggcggcgcgcgaggcggggctgaagcggatcctgccggaggagcaccgctttccctggcagattgaggtctttctcagcagcaatgactcgttcttctttccgcagctggcgcaggattttgccgccgtggcggatagcctcggctatcgccgtctgaccttgcaccgcacctttgtcccggagtcgcagccgacgacgctggcccggcgcattgcgcgcagttgccagcaacgtcaggggatcatcgtcttcggcaatgaccatcccgcggtgcacgacgcgctgcgccgctgccgggaggctggcgtcccggcgatcaccctggcgacggacctgcccggcgccgaccgactctgccacgtggggatcaatcagctgcaggctggccgcacggcggggttaatgctggggagaatgacgccgcggcccggcgaggtgctgatggtcagcggccggcaagattacagcgcgcatcgcctgcgcattcaggggttccgcgaggtgctgagccagcgctttccccacctgcagctcagcgacgtgctggcgggcgaggagcggcgggagcagatcacccgcctggtggagcaagccctgtgccgcagccggaatattgttgggatctataacaccgggcttggcaatacccagattgccgaggcgctggcccgccaccgccgcgaaggcgacgtctgctggatcacccatgagcgttacaacaccacccggcagcagctggcgaagggcagcctggcgttaacgctcgatcagaacacccgccagcacgcccagctggcgatcgacctgatgctgcgccatctggagtccggctaccagccgcaaacctatgccgacggtaaagtcgactttatcctctacagcgccgagaacgtggactaaggcgtgcggcgcctcccttcctgacaacacggatttccccggcgggtaaatgaccaccccgccgggagggatcgcttcaaagcgttgtctgcttctcatttttcgctcatttatgcggcaatgttagatgtctgtcaaaattctgttactgcatagttttaaaattttcatttcagttatttacttataaaagtttcaaatgtcttgttaatgaaataaatggtctgaaatccaggttgcggcgtaaatggactgatgtttcaaaatagtgatgataaaacagccgttatttgtgatttagatcacgatggagtgcgagaggtgccgcagcgtcgtcgatataccagcagacatttgccgcaacgtaactgaaattaatttttcattttgtttcattcaccggcgtacctacaaaatcaaggatcaactatgaatattaagaaaacgattgttgcctctttgttagcctgcatgctgcctgcggtggttatggcaaaagatgtctccattggcgtctcgatggcgctgtttgacgataacttcctgacgatcctgcgtacctcgatgcaaaaagagatgaaaaaagatggcgttaaatcgcagatcgaggacgcgaaaggggatgtctcccagcagctgcagcaggtgcagaactttatcggccagggggtggacgccattatcgtcaacccggtggataccaacgcggtgaaaccgatcatggatcaggccaccaaagccgggatcccgctggtgtttgtgaaccgccgtccgcaggcggagctgaccgacaagatggcctatgtgggatcggactccattcttgccggccgtctgcagatggaagcgctggcgaaagcgatgaacggtaagggcaatgtggcgatcctgctcggcgacctggcgaatgaatccactcgcgaccgcaccaaaggggtggaagaggtggtagcgaaatacccgaacatcaaaatcgtccagaagcagaccgcgaaatttacccgcaatgacgccgtggacgtggtcagcaactggatgaccagcggtgaggatatccaggccatcgcctccaacaacgatgaaatggcgatcggcgccctgcaggcgctgggcaaaaacccgaaccatattctcatcgccggcgtggatggcaccccggatgccctgcagatgctgaagagcggcaagatgatcgccaccatcttccaggatgcgaaaggccagggtgaaggcgcagtagacgcggccatcaagctggcgaacggcgagaaagtggaaaaaatcatcgacgtgccgtatcagctgatcaccaaagagaacatggctgaatttaccaaccgtaatcagaaatagtcctggtcaacctgtggtacggaggtggatgtatgaacgcttttgcccttgaagccgaaggtatcagtaagttcttccccggcgtgaaggcgctcgataatgtctcattgcgcgtgcgtccgggaacggtgcatgccctgatgggcgagaacggcgccggtaaatccacgctgatgaaatgcctgatcggtatctatcgccccgataaagggtcgattcgcgtgaaaggggagccggtggagtttaccgacaccatggatgcgctgcgctcggggatctcgatgatccaccaggagctcaatctggtgccgcatatgacggtggcggagaatatctggctggggcgcgagccgatgaaatacggctttgtcgaccacggccagctgacccgccagacccaggcgctgctggataagctcaatatccgcttaaccgctgaccggctggtgggcgacctgagcatcgccgcccagcagatggtggagattgccaaagcggtttcatggaacgcggatatcgtgatcatggatgagcccacctcggcgctgaccgaaggcgaggtggctcacctgttcaccatcatccgcgacctgcgcgcccagggtaaagcgatcatctatatcagccacaaaatggatgagatctttgccatcaccgatgagatcagcgtctttcgcgacggcacctgggtggggagcaaaaacaccaccgaatttacccggcagtcgctgatcacccagatggtgggccgcgaattaacccagctgtttccgaaatttaataacaccatcggcgaagaggtgctgacggtgcgcaacctgacgcgtcagggcgtgttccatgacgtcagctttagcgtacgccgtggcgaaatcctgggcgtggccgggctggtgggcgccgggcgcagcgaggtgatggaaagcctgttcggtatggagcgcttcgacagcggcgaagtgctgatcgacggggcgccggtgaccatcgattccccctccgtggcgattgaaaaggggatggcattattaaccgaagaccggaaaaagtcgggcctgtttctggtgctgtcggtgctggaaaatatgagtatcgtcaaaatgccggaatatatcggcaagagcggttttgtccagcacgtgaaaatggccgaagactgcatggagcaaatacgccggctcaatattaaaacgccgacgatggatcaaattattaataacctcagcggggggaatcagcaaaaagtcctgattgcgcgctggctgttagcgcaaccgaaaatcttaattctcgatgagccgacccgcggtatcgacgtcggggcgaaggcggagatttatcatcttatcagtgaactggcgaatcggggggtggcggtgattatggtctcctctgaactgccggaaatccttggcatgagcgatcgggtcatggtgatgcatgaaggtcgtatcaccggcatcctggaaaaagacgaagccgaccaggaaaccattttgtcgttggcatcccattgaggcacagagaatgagtaatatgaaattaacggcggctccggccagcgagggttcctccttcttcgctaatttgcggcataaaatgccgaaagataccggcatctttgtggtgatgctggtgatcgccctgacctttgaaatcgccggctggtatgttcgcgaccagtcgttcctgctcaataccaaccggctggtgctgattgtgctgcaggtggcgattatcggcatcatcgccgtcggcgtcacccaggtgatcatcaccaccgggattgacctctcctccggctcggttattgcccttgcggcggtggtggcggccagcctggcgcaaacctccgatagcctgtcgccaatgttcccggcgctggtcaacctgccggcggtgatccccatttgcgcggggatcggcgtcggcctgctgtgcggcctgaccaatggtttcctggtgacgcggaccggtatcccgccgtttatcgccaccctcgggatgatggtttcggcgcgcggtctggcgcagtattacactcagggcaacccgatcagcttcctctccgacagctttacggcgataggccagggggcgatgccggtgattatcttcttcgtgatcgccgccgtgtttcacattgcgctgaagcatacccggtatggcaaatatgtgtatgccatcggcggcaacatgacctcggccaaagtgtccggcatcaatgtgaataaatatctggtgatcgtctacaccatcgccggggcgctctccgggctggcgggggtggtgctggcggcgcgcgtcagtagcggccagtcgagcatggggatgtcctacgagctggacgcgattgccgccgcggtgatcggcggcagcagcttaatgggcggagtggggcgcattaccggcaccctgattggcgcgatgatccttggcctgatcaaaagcggttttacctttgtcggcgtcgatgcctatgtgcaggatattattaaaggcatcattatcgttgcggcggtaaccatcgatatgcgtcgcaaccggaaaaaacactaatcttatcaacgggcggcaacggcgaaggatgccgttgccgcccgtcctgtccagaaataaacaaaatactccccgccaggctccgcctgtctgttttgcccgcgctgcgcatcctgtacagtttcgccacttccgttgtccattcgtcaggggccacgcgtggcctgcggtttctggagtcgtatgaatacaccatcctttggcaaattctcgccgcgctggctagcgggaaaaaggggccttatcgtcacgctgctcgcggggctggcgatcctggcgctcggtcggggcatgaatttgccggccagagaggtttaccgtgagaggcagatccgccagctggaggaggatgcgcagtgggtggcggaacgccttgagcggcggatgaacattccggcgccgcagcgggaagcgacctggccgctggcggcgatgcgcgccgctctccagaccctcgcccaggagcggcattatcagctgctgctggtgaatggcgacgggcatctgctggcggcatcgcacgcgctgccggccagcgtgctggcccaagtgcaggcgcagttcccgcgagagatgcagcccccgctgttcggcagccactaccagaccattcagccattcgccccgcatcaaaggatgttaagccgggcgctgaacggcaacgcggggctggcgggctggaatctggtgatgctggcgccggatggtggattgccctcgttgctggtggcttaccgctggccggtaacgatcggccttggcgggtgctcgccagcgcgctgctggcgctgaggcaagcggcgcgcgctaggcgaaaacgctaattgccaaccgcgccgtcagggatggcgaatctgcagggtggcgggcaggtagcgctgaagcggctccggggcctgaccgtcgatcagctggctgagcagatcgtagcagtgccaggccagctggcgattatcctgctgcacggtatcaatgcgcagggaaagcgaatcatacagatagtgatcgtcgaagctggcgagatgaatattggaatccagcagatgatgctggctcatatagcgcagcaccccttcgagcagcccgcaggccgcggtgaagagcgccttcggcggacgccccagccgcgcgcagagcgccgcgaacatctcatagccggagctggggtggtagttgccgttgatcacccactcagggcgcagcgtgatccccgcctgggccaggccctgggtgaaccccgccagccggtcgcgcgacggcgacagccgcggctggccgccgagaaaccagaactcgtccgcatgctgaggcgcgatacgggagatcagctcggccgttggggtgaccgagtcggtcatcaccagcggcagggcgctgtcgctgggggagcggtcaaacagcaccaccggcagctgttcgctgagtttctgatagtcggcatcgctgtgcatacaagaggcgacaatcaggccgtcgacctggcgggcgatcatgttattgaccaccacgctctcctggccagggttttcgtcggtgcaggagataagcagctgcacgccggcttcccggcagagcgtctcaagctcgtgggagaaaacggcaaacccgtagttggtgatctccggcaccaccagaccaatggtatggctgcggttatcgcgcagcgagcgcgcgtgaatgctcggctgatagtgctgttcgcgagcgatcgccagtacgcgctcgcgcgtctcctgcgccacgcgcagctctttaccacgaccgttgagtaccaggctggcggtcgctttggagacgcccgccagttcggcgatatctttgatagttacgcgtttggttttcatcagcacccgggagcctgaaagcaaaacgcttattctaccatgcatggccgcagcagccagcggcagaatgctaccggcgtcgcaccgctgaagatgagctgccccggatagcccgggaagaagcggctgctcatcaccccctcgccatcgttgatgaaaatctccacgctggagcggtcgataaagatccgcaggcgtcgcgcctcgccgcgccagtagcggtgatgcagctccgccgtctgcaggccgcgacgcgacagacgcaggccgtcgcgattgacggtgagctgcagggcgccggcaaagtccagccccagcgtgctgttgggggcgatgtcaaaggccagctccatcggggcgaggggcagggtctgtccgcaccagccctgggcttccccgcgcagggcgaccagctcgcgcagcggacgctgatacagagtgccagcctgccactccagctcacgcacgcaggtcatctgatggatccagccctgcgcgcgggtgggctgatgcatctcgtccccgtcggggacgcccatccagccaaccagcaggcggcggccatcatcggcctgcatggtctgcggcgcgtagaactcaaatccgctgtccagctcgtgcagcgggccgtggtcgaagatcccgcgttcggcgtcgaagcggcctgccatccacaccgccggataggtattgagaaagcgctgcgcttcgcgggccagcccctgcgggcagcagatcagcaggtgggtgtccgccagcggaaagagatccgggcactcccacatgtagccggcgttcgccaggccgtttacgtcgtgcccggcaatctcgcccaccaggcgccactcccgcaggtcgctggcggtaaacagcagcactttgccgcgctgttgcacatcctgcgccccaagaaccatgtaccagcgcccgtcctgccgccacactttagggtcgcgcacatggccggtatagccttctggcagcggcagcaccggccccagcttgcggaaggtgccatcggcattctcggtcgccagacattgccaggcggtgcgcccgccgtcggggaatttcacgttgccggtgtagcacagagtcagggcgccctcgaactcgaccgcgctgccagagtagcagccgttgcggtcatactcttcatccggcatcagggcgataggttcgtgccgccagtgcagcagatcggcagagctccagtgtccccagcacttataggtatggtcgcaggcgagcgggttccactgataaaacaggtggtaacgcccggcgacctggcaaaagccgttaggatcgttcagcagtccgttgaccggcgccagatgccattgcggataatggctgtcggccagcgcctgcggctggccctgcataacggcctgcaggatcgcaggcaggcgtgacggtaatgacattattcagcgtccgttttgtatttcagcgtcagagagagcgcgaaggccacggcgaaggcgatcgccattccgataatgtagttcagcagcgagctggcctgcacgatagccatccccgggatcgccgtcaggcccaccgcggtcatgtagacgtgcatcgacaccacccaggcgccgccggcggcaccgcccaccagcgcggcgataaacggtttcacaaagcgcaggttaatcccgaagattgccgcctcggtgatccccagcatcgccgaaaacgccgacggcagggtgatggcttttattttggcatctttggttttaaaccacaccgcaaagcaggcgccgccctgggcgacgttggccatcgcccagatcggcagcaggaagttgacgccaatcgatgggttgcccagcagtccggcctcgatggcatggaagctgtgatggataccggtaatgacgatcaccgaatagaggccgccgaacagcaggcccgccagccagccggcatggctgataagcgtgctgaggataaacgaaatgccgtcgccgagcgcgcgaccggccgggccgatcagcagcagggcgataaagccggagataatcaccgtcaggaacggagtgaggatcaggtccagcgcgtcagggatcacgcggcgcagccgcttctcgaccatgctcataaaccacaccgccagcagcaccgggaagacggtgccctggtagccgatcatcgccacttcgatgccgaagaaattcatggtgtggaagccggcggcgacgccccaggcgttggtcagcgccggatgggtgaggatcccgccgagggtcgcgcccagataggggttaccgccaaattcgcgtgcggcggtaaagccgatcaggatcggcagaatgataaacgccgccgaactgcacatatccagcatgatatagagagcgttgctcgggtcgacccaaccgtaggttttcaccatccccagcaggcccatcagcaggccggaggcgacgatggccggaataatcggcacgaagatgttggacagcaggcgggcgatgcgctggaacgggttcagctttttcgccgccaggtcggcggcttcggatttgctcgattcgctgatgcctgcggcctggataaaggcggcatagactttattgaccaccccggtgccgaagatgatctgcatctgtccggcattgcgaaagcagcctttcaccccgtcgattttgccaatcgcctgctgatcggcgagcgcgtcgtcgaccagcaccagccgcaggcgggtggcgcagtgcgcggcgctggcgatattttccttgccgcccagcaggggaagcagtgagcgggaaatctgttcaaaatccatagtaccctctaaatgcatgatgatatggcgtgggcggcgccagccgtggcaggcgccgcgaaccttatatttatgtgttatttaccctgtcgccccggttgccgtcagaaccaggtctccatttgcataccgaacgaccattcgccgcccgatttgaatccgttgctgcctaacgcgtcatcgttggcgtagttgtccagttttttgctccagtccatccacgatgtatagaagcggatctccggccgcgagaagaagtcgccgatgctgcccaccttgaaggtcggggcgaaggtcagcttgtagaagctgccattgaccgcatggcgatcgttgtagccttcaggctgcagatccatgtactgatagctgccctcccaggcgagggcgaagttctgcgtcacttcctgaatcagacgcaggttgagggtggcccactgatagctgtcgccatcgacataacgatctttactgctctgcgccagcacggccggggcaataaaccagcgatcgctcagcggcgtggtgccatagctggcgaagcgccaggtattggcccccgggcgcagcgcgccgtcggagccgatgcctttaacctcggcgcccagcccgtggccgtacagcagggccgttttgctggtcccgtcgcgcaggccatagaagctctcattgtgcaggcccagcagggcatgaaccccggtgttagcggcatcgcctttcaccagattgccgttcgcgtcctggcggtcgtcattatctttcgcccgcatcccgctgaccatcatctgcaccgggccggcaaagttattcatgctgacgatatagttctgcacgctgttgctgctgtcggcgatatcgccaaagttgcggccgtataacgagaagttgctgcgcaggctgtcgttccatttcacgtcgtagatcccgccgccggtcccggcgaggaacaccacatccgagtcaatccagtggatgtcgaagttgtcgcggtcaaagcgtttcccggcccacagggtcgagcctttgaacgggccttcgaaggtcggcaggttgcccagctcgacgaacgcctggcgcacgttcagatcgctgctgcttgccgtccagtcgttataagtggtctgtccgtcggccaccatcactttgaaacgggtggtcgccccgttgtccagggtctgtttatgttcgaggttcatttccacataggtgtcggcctggttgcccaggcgaccaatggcgccgccggtctccccggcgggggtcatataagcgccggatttggtactggcggccgagtcgttcatgatcaccccggaacgcgcatagccgtggaactcaaagccgccgggccgttcggctttttcttccagttgagtggtgcgcctggccacctgctgggtggtggcctgggtttgctgctgctgctgggttaactgctgaactttctgctccgctgaggcggcgcggctttcggcagtgctggcgcgggtctcggcgtcctgcaggcgtttttccagggcggcgagacgcgcttcaatgctgttcaggtctgtctgcccatgggcggcggcggtgccggttagcaaagcaataagaatggctaacttccgttttttatacatgttggtgacatccaaaggtaaatcagtgagtgtgctaacgtttgctaaaccggtttagttgatatggtaaacatgtcggtaacgcggtgaaaataaaaattgctaaaccggtttaagaattgtgatgtcgccagcaaagtgggccgttaaccggcccaaggggatcacagcgagcgctgaagatcgtccctgtagggcagggcggtcatggcgcctttggcggtggtggccagggcgccgcaggtttgcgccagcgcgaggtcgggagccagggctgcgaggttgtccgggataccgtgggcggcgaggccggcgagtagcccggcgacaaaggcatcgccggcgccggtggtatcgacggccaccaccgggcgggcagggaagtggctaacctgcccgcgcagggcggcctggacccccgctttaccctgggtcaccagcagtagcgtcggctggaagcgggcgttcagccgggcggtgccgctgacgatgtcgtcgctgccgctgataaacgccagctcctcttccgaaagttttatggcgtcggcgagggccagcgcccggtcgagacagtcgcgaaggtcctgcggatcctgccacaggtcgctgcggatattggggtcgaagctgacatagcccccggcgcgctttatcgcctccatcgccgcgaatgtcgtgctgcggctcggctccgcgctgagagcgatggagcagacgtgcagccactgaccggcggcaaacggcgggagatcctcgggctgaaggaacaggtcggcgctcggacggaccataaaggtaaaggtgcgctccccgtggctatcgagatcgaccaccaccgtggaggtgcgctgcgccgcatcgaggcgcatatagttcacatccacttgctcctgcgccagggtgtgacgcataaaacggccgaagggatcgtcgccgacgcggccgataaacccgctgtcaccgccgagccgcgccacgccgaccgccacgttggccggcgcgccgccggggcattgcagcaggcggccctctccatcgggcaggagatcgacgaccgcatcgccgagtacccagatttttccattcatacgacaagctcctctaagctaaactttattaaaccggtttagctcattaaagcacagcccaccggtaagcggaacgattgggtcacgaaacagggaggcgagggtaaaaaatgtgagccaggcggaatatttcgccactccagatctggacttttccttccccacccgcttaggtatagttcaccaggtcgcggttagccccgccgcggtggccaaaggtaaaggagtgcgtagcgcgatgaaccccagttttggcgatatttacgatcggtaccagaagctgacgctgactacgcatctgccggcggtgatcgcctgcagtgaaacgctgagtttgggcaaagaccagggctttattccgcagccgggctatctctactttctgctgcaggggcaaatgacattggcctttggtgatgagcagaacctggtcgggattgttatcgcgcatatgccgttaggattactggaacattattgtccgtcggtcgcgctctattatcagtgtctgggcgagtgccagctggcgaaaataaccgccagcgattttgagcgaatattctttcattcgtcgccgggctatatgcaagagctgaccacgatcctggcctatatgggcatatttgcccttgatgcccactatgaacgtggcagccagaccagctttcagaccattaaatcgatgctgtcgcgctatttatatcgcggcgaaattgatgggggtcagcatgagagcctgtcggcatttattattaaacgaaccaatctctcgcgcagctatgtgtaccaggtgctggccgcgctgcgcgaggggggatatatcacggtgaaaaaaggcaagctgatctccatcgatcgtcatattcctgagaaattctgaatccgattcggcagattcacgccatcacgttgctattaccgccagggaaagcgctaagcgcgctttttcccccggccccgttacgcctgaatctggctgttttatttatttaaccttgcactctggagttattttatgaccctggactatgtggcgctggccattctgatcgccgtggccttaatacttttttatggcgtgattgttattcacgatattccttatgaaatcgccaaagagcggcgtcatcctcatcaggatgcgattcattatgccggttgggtcagcttatttaccctccacgcgctgtggcccttgttatggatctgggcgacgctgtggcgcgaagaccgcggatgggggatgcgccacattgccgacgagcagcaggcgctgcatcagcgtctggaaacggtggtccagcagctggaacaggtccagcgcgaggtggacgttctgaaagcgaaggaggcaaaataatggaaacgttaatgttgctgacctacgccgcgctatgcatcgtggtgtttaaagtttttcgcatcccgctaaataagtggaccgtaccgacggcggtgctcggcggtatcgccctgattggcgcggtgatcttcgggatgaactacaacttcccttataccgacgtcggtaaccaggtgtttcgcaccgtgccgattgtgtcgcaggtacgcggccgggtgcagagcgtaccggtgaagcctaaccagatgctgcataagggcgatgtactgtttaccctcgacccgacgccgttccaggcgaaagtagacgatctgcaggcgcagataaaagcagccagtcaggatgcgctctccttaaacgcggcgttaagccaggcgcaggccgagctgagccgtgcggtggcccagcgcgaccagtcgcggcgggagtatgcccgctatcggaagggccatgcccagggcgctttctccgatcaaatggttgatacccgtctgcagacgtggaaagccgatgaagccagcgtcagcgcggctcaggcgaaggtggttcaggcgcgtaatgcgctggactcggtggtgaagggcaaaaacaccaccgtggcctccctgctggcgcagctgcaaaaggcgcagtttcagctggagaacaccgtcgtccgcgccccggaggatggctatgtcagtaccgtcggcttacggccgggcaccatgtccactgcgctggggatgatcccgctgatgacctttgtgccggtggagggcgccgcctcgcgggagtacgtcgcggcatttcgccagaacgccctgcagcgtctgcgcaaaggcgagcccgcggagctgatgtttccggctatcccgggcaccgtctttcgcggagaagtggccgacgtgctgccggcgattggcgagagccagttccaggggcagggcaaattgctgaccacagacgcgctcaatacccatggccgggcgctggtggtgctgaaggtgaccgatccgcgatttgccgaatacgctctaccgcagggggctaccctcgaggcggcggtctactcggatcatctgaaagagctgtcgctgatcaggaagatcctgatccgcatgaagagctgggaaaactatatctatctcgatcactaagccggcgggcgcggggcggacgaaccgccccgcgccgcggtcaggcctcgctgtccaccaggccgtcaataatcacctgccgcaccccctgcgaacagggttcaatacgcccgcgcaccccatagacggccgccagagtctcgggggtgatgaccgcggccggggtgccgtcgccgagcagctggcccgccttgagcatcagcacgtggtcggcgtgacgcagggcaatattgatgtcgtgcaccaccaccagggtcacgatgttgcgccgccgggtctcccggcgcaccagatccatcacgtgaaactggtagttgaggtcaagggcgctgagcggttcgtcgagcagcagcaggcgcggctggcggatcagcgactgggcgagacccaccagctgcttttgcccgccggagagctgatcgaggtagctcatcgccagatgggcaatccccagctgtcgcagcagcgccatcacttcctcctggcgctgcggactgtggcgtcctccggcggcgcgctgggcaacgataatcgactccagcacatgcagatgcacgccggcgggcagcgtctgcggaagatagaccacctgctctgcgcgacgtgagaacggctgcgtcagcagattttccccctccagcagcagctcgccgccgcaggggcccagacccgccatcgcccgcattaacgttgatttaccgctgccgtttggccccagcagcgcggtgattttccctcgcggcagatggggaaccgtcaggttctcgatcaccttgcgtctggggtagccggcgctgaagtgagacagcgacagcccggataatgtctggtcgctcatacctgcccccgatgacgtaaaatgatgctcaaaaagaacgggaccccgaccagggaagtgacgatccccaccggaataatggccccggggatcaggtttttcgaggcgatggaggccagggagagcaccagggcgccgatcagcgcgctggcgggcaggtaaaagcgatggtcttcgccgaagagcatccgcgcaatatgcggcgccaccaggccgataaagccgattggcccgacaaaggccaccgaaagcgctgacaggatgctgatccgcagcagcgtggtcaggcgcagacggcgaacgttaatgccaaagctgatggcccggtcctcgcccaaccgcagggcggtcagcttccacgcgctgcgcagcgacaggggcatcaccagcgccagggcgaccagcaggatggcgactttgctccaggaggcgcgatcgatgctgcccatggtccagaacaccagcccctgcagcgtgtcttcgttggcgatgaactgcagcatcgagaccagagcgttaaaggtaaagaccagcgcgatgccgaacagaatgacgccggaggtggccacctgggtccagcgggtgatgccgtccagcagcagggccgccagcagggcgaagataaaggcgttggccgagataaaccactggccgggaataccgggcagaccaatacccagcacaatcgccagcgcggcgccaaacgccgcagccgaggagacgccgagggtaaacgggctggccagcgggttattgaggatggtctgcatttcggcgccggccagtcccagcgccagaccgacgataatcgccatcaccgcatagggcaggcggatatcccagacgatggcgcgcgtgcccggatcggcgctggccggatcggttaacgtctgccacaggctctgcagcggcagaccggaggggccgagcataaaatcgagcagcagtgacgcgacaatcaacagcgccagcaggaggatcagcagcagacggcgacgcacgatacggcgatagtcatccatcacgccagaggtcccggcgggcagcccgtcgagcacggagtcggaggttaaacgcatgctgtatttactcgctctgctgccaggagaagacgaacggctggtccggcaggtcggtgaaatggcgcacgatataatggtacgtctcatccgggttgagatcgccgaaggcctgcgggtagatatctttcgccaggtattccatgccgacaatattccacgggtggttatagaagtggtgataaacgccataggcccgcttttcctgtaccgccgggatctggctgaccccaggtcgcgccagcagcgtctgcgcctgggccttcaccgcctctggcttaaccgcataacccaggggcaacacctggctgttgccgcgcttcgagccggtcatgatccaggcgtcgggcttcatgctgatgattttctccagcgaaacgaacccggaggcgcccggcagcagctgcgaaccgatattgttcgccccgaccgcctccaccagcccgccccagccgctgtggccgtgggtaaagcagcaggcgtcgctgttgccggccagcgcttccacgaagacgttggccttcggcgtgatggtcgcggtcttctggcgaatcgactgcagctgctgacgatagtaatcggtaaaggctttggcctggctctcgcggttaaggactttgcccagcaggtcgatgctgggggcggtatctttcgccggggcgatctcatagtcgacaaacagcaccggaacgtgcagggcgctgagcttgtcgatgacgccgctctccatcagcgctggcctggcgcgcagctgggcgatcatcagatccggctgacgggcgatgacgctttcaagatcgacgttccctttatcgctgaagcccatgtcaaggatcgtggccgactggggccacgtcgttttcagcatctgccaggtggcaacatcctgctttttcgccagattattccatgccaccagccgtttaaacggattgtcccggtccagcagggcgagggtcataatgtcgcggccatcctgcaaaataatacgctgcggctctttggcgagggtgacctgccggccgtcgaggtccgtgaccgtcaggggatattgggttgcatagctgaggaggggcgtcgcgagcagcgcagtaagtaacagcgatcttactgattttcttgccataaaatgagttccgtttgccaatttataaatataatgattctgagaattattctcgagtaaacgtcaacggcaagtatatcaagggcaaatttcataaaatgtaacaaacatgttggaaattatgccaacgccgacagggcgcgcgcggcggcagcattttctgccatggctggaggtcgaagacgtttttcaggctaattcctaatgtcatccccggttcgttgtgccatcctgaatgcgactcataacacgacacgtgagagaggatattatgaaaaaagcaatgattgcgttatcggctattctggttgcggctccggtttttgctgcgacaacacatgcaacagatgataccgtcgcggcggcgaatgccaacgccaacaccgctaaagagaagctgcatcaggcccagcacgagggcgaagagcagcagctgaaggcgaaacacgccgccgaaggcaagcaggacagcgtcggcagccaggtgagcgaaggcgcgcagaaaacctggaacaagaccaaagaaggcaccgagaaggggtgggataagaccaaagaggtcagtgaaaaaggctggaatgccaccaaatccggtgcggaaaagggctgggataaaaccaaaaccggcgccgaagaattaaaaaataaagtgactgaataagtcctttaacctgtctgaataaaggtcgcgaaagcggccttttttattgtccttcctcccgcagcctggctgttgcgcagcacagcaactgccgatgccaggaatcgtcctggttaaccagttactcactctttcttcacatttgcccgttacaaaggagctgaatcaggaggtgtaccatgaaaaagatgatttctctggcagtaattttatcctgtgtgctgagcgtcccggcctttgccgatggcccgaacgacggccatcgtccggggcaacccacggtgtggcagaacggtccggaccatgacgggcatgcaccgcagggcggacctgacgcgcatcatcagggcgaccatgaccagcgtggcccggatcgcgacggccatgacaaacgcgatctggcacgtcatgagcaggaccatttcgcctggcgcgggaacgatttccgcaaaggccacccggctccggcgccgttccgtggcgatgaatatcgcgtccgcgactggagcgaccgcggcctgccgcccccgccggaaggccatcactggtcctatatcgacggtaactatgtgctgatcgccgcggcgaccgggatcatcacctcgattctggtgagcggcgccctcggccactaaatgcgctgctccgcgacgccgggtcaggaaaagcctgatccggcgatggcgcactcgcggaaagctacggatccagcgcagcatccggccagtatttataaccattgatcgttgcctgggtggacagttctttttcggtcagatgataaacgttgaccttcgaggacaacgaggcggtatctgacgccacgccgctggaagcggcggcgatcggcgcgctgcagcccgccagcgcaacgattgcgagaaggaaaagcctctgtaattgcctgcccgtttattttatataacgctggatgtggccgtgcagggtagggtaaataacggaaaatcctcaaaaaaataaacttttattttttaattgcactatttttattattcattgcgctgtgatgagtgaattattaaataagatgcgtccattccaggtattagaaatgctgcttgcataaacttttcatcgcgataccgtgataagtccttaatttatttcccggagagcggcatgagtgattatgtaattccagaaattaaagcgacggaagcggaaatgatttctatccgtcattatttacatgccaatccggaattaagtcttgaagagtttaataccagcgaactggtcgccagcaagctgacggagtggggctatcaggtgacgcgcggtctcggcaagaccggcgtggtcggcagcctgagcaaaggcgattctccgcgcaccatcggtttacgcgccgatatggatgccctgccgatcgaggaaaccaccggtttaccctgggccagcacggcgccaggaaaaatgcacgcctgcggccatgacggtcacaccaccattctgctggcggcggcgaaatatatcgcctcgccggcctgtcagttcaacggcacggtgcatatgatttttcagccggcggaagaggctatcggcggcgcggatttaatgattaaagacggcctgttcgagcagttcccctgcgaacgcatctttggcttgcacaacatgccaggcctgcctgtaggcaagctgggcttctacgccggcaacttcatggcctcggcggacaccgtcaaaatcacgattaccggctacggcggccacggcgcccaccccgagcgcaccgtcgacccgatcgtcgccggtgcggcgctggtgatggccctgcagagcatcgtggcgcgcaacgtgccgccgggggaaacggcagtggtcagcgtcggcaccttccaggccggtatcgcttccaacgtcattccggagagcgcggtgatggagctgagcgtgcgggcgatgaagccggaaatccgcgacctgctgatcaagcgtattcacgagctcgctgactttaccgccaaaagctatggcgccagcagcgtagtggaggtttacgactcctatccggtattaaccaacagtcctgaagagaccgatttcgcccgggcgctggcgctggaggtgtttggccgcgaaggggtcctggagtcggtctcgccgatgaacgccagcgaggatttcgcttttatgctgcgcgaacgcccgggcagctacttcctgctcggcaatggcgagaaaggggagaagggcggttgcatggtgcacaaccccggctacgactttaacgatgacattatcaccatcggcgcgacgctgttcgcccgtctggtggaaaaacactgtcgctaatctctggagaagaacgcgaatgaaaaaatcactattgctatggctggcattaatggcgtcgacgtcggcgctggccgaagggggaaaggagatccgcttcggcgtcgacccgactttcgcgccgtttgaatggaaagatccgcagggcaagctggcggggtttgatatcgatttaggcaacgccatttgtcagcagctgcaggcgaaatgcgtgtgggtggaaagcaatttcgacggcattatcccggcgctgaaggcgcgtaaattcgacgcgatcctttccgggatgtacatgaccgagaagcgcaaagcgcagattgcctttagcgacaagttgtataacggaccggtgttcctcgtggcgcgtaaaaataccctgcaaggcaatacgccggaacagctgaagggcaaaaccatcggcgtggagcagggctcggcgcaggagacgtatgttaaccagcactggcggccgcaggggataaacattgtggcttaccagggggccgatagcgtggtgcgtgacctggagtcggggcgcatcgacggcgcggtgctctccgggatgatggccgactacagcttcctgcagcagccgcagggtaaagaattcgcctttgtcggcggccatctgcaggacgatacgctgtttggcgccggggcggcgataggtttgcgtaaagacgatgaggcgctgcgtcaggaaattaacggcgcgattgcgaagattcttgccgacggcacctataaaaaattagctggcaaatattttagctttgatgtttattccgggacataatgtcagagtgtacctgcgggcgtggagcgcccgccgtaagattccttttctgattatccaatcgacctcctctcctgacccctgtggttacctgagggaagcagaatataagctaaggagtactcggcatgatgacacgtcctttgggcaaaaccggattttccatcgccccattagtctttggcggcaacgtctttggctggaccatcgatgaaaaaaccagttttgctcttcttgatgctttcgttgaccacggttttgacgctatcgatacggcggatgtttattcccgctgggcggagggcaaccagggcggcgaatctgaaaccataatcggccgctggctacaggcgcgccccggcatgcgtgataaagtcaaaattttcaccaaagtcggctccgatctcggcctccccggccataaagggctcagcaaagcctggatccaacaggcggttgacgactctctgcgtcgcctgaataccgattatatcgacctctacttctcccactggccggatccgcaaaccccggtggcggaaacgctggaggccttccacagcctgcagcaggccggaaaaatccgcgcgatgggggcctctaacctcgatgcgatgcagctggcgggggcgctggaggtggcgcgtaagggcggcttgcctgcgtggcaggtgctgcagccggaatataacctctaccaccgctctgcgtttgaaggcgcgctgtgcgatctctgcgtcagccgcgatatcggggtggtgacctactacagcctggcctcggggttcttaaccggtaagtaccgccagccgtcggatctgacacagagccagcgcggaagcgggattggtaagtacctgaatccgcgcgggatgcggattatcgataccctggcggcggtcgcggacgagcagggcgcgaagccggctgaggtggccctggcgtggctgatcggccgcgaaggggtgaccgcgccgatcgccagcgccaccagcgtggctcaggtggagagttttgcccgcgcggcggcgctgagcctgagcgcggagcaagtggcgcggctggacggcgccagcgcctgaggcaatccctcttcccggcggggagaggggggaaggctatacatgacgcggaccgtaggccgggtaaggcgccagccgccacccggcaaaataacggcgcaaccggaaatgtccctgttcgcgctgcgcttagcagggctacagcttctgtgttacttccgggccgattgcgctcccggttaattgtctgcgttatggcagtcatggtgcagggagcgcacagggggcggccagtcgccgccgccccctgtacccccgggctccggccagcaacatcgccgctgcgcggtgccttcgacttatccctgcaggcttagggtcgggccgaggcagcgtccctgcaaaatacggccctcagcccgcattcatgcgggcttccccgaccttccgggaacgtctcagcgatgttgaggccgcaacaccggcagtttcagtcgcacaagtgggtaagttaacggctggctgctacggaccgtaggccgggtaaggcgccagccgccacccggcaataaagcggctccgtgcctgatggcatcgcccggtggcgctgcgcttaccgggcctacgaggtgtgatcctgtgagaggctcctgtaggccgggtaaggcgccagccgccacccggcaataaagcggctctgtgcctgatggcatcgcccggtggcgctgcgcttaccgggcctgcgaggtgtgagcctgtgagaggccccggtaggccgggtaaggcgcagccgccacccggcgaaatgacgggtgcggtgcctgaaagcgtgcccggcggcgccctactattcctgatggcgggtgacgttgaggatcttcgcgctggcgccgaccgggaaattgctgagggcgccgaaatcgctgccctgatagcccatgatcttgccgtcagtgcgcatcagctgcagatcgatgaggatcacccccagcgtgggaatgattttctcccgccagacgaacaaatagagatcctcagccacctgcacgtaatggcagcgatcgacatccgccagccccttttccacgccgtccagacactgccaggcgtaaaaattatcgttgagatagatgtgctcatagcgctcggtcgggctataggtgtactgattgcgcatgccgaccagcgcggtggtaaagtccggcagcggccccggctgggcatccaggcgggcgaagacgaaacgggcctcaaccgcggtcagcggcaacccttgttctacccggctgaaggcgtccagccgcgcggcggcttcgtccggcagctggccgtataccagcgtggcattgcgctgcgtcaggttgcataccgcgctaatgctggcgttatcccgctccgggtcaaggaagtcgataaacagaatgtccgggcgcagggcggttgcccgccagggggcgcgcttgccgttccagcttagcgtctgctcatcttcgataaccagctgctgcggctcgctcccggcgacataaaaggtaaagttttcgcctgcgggcaggctggcggtagccagcaggttaccgtgcggcgcaaaaccatcggccagcgcgccgacctggataaatacggcttctgaagtcataggggctcctgaacagagtagggcgttaggcaaacgccagagtgggaacatcgacgatactggccccgccgtcggcgaccagcgtagcgccgctgatgatggcggcctgcggagagcagagaaactgacaggcctgggctatctcctcggggctggcggggcggcgcagcggaacatcgcgacagacccgctgataagcctcagccagcgacagcccttccgcctgcatcagcgggtgcatctcttcatccgccatcggcgtcgtgacccagccgggacagacggcgttagcgcgtacccccttggggccataatcgcgggcgacggagcgcatcaggccgattaaagcgtgtttggcggtgacgtagccgcaggcctgcggcccggcggccagagaggcgatggaggcgacaaacagcacattgccgcggcgggcaatcagcgaaggcagacaggcgcgaacgctggcgaaggcgctggtgagattgccgtccagcgcctcgcgccattggcggtcgctggtctcggcggcggggctgttgcccatcccgccggcgctgcagatgaggacatcaatcccgccggtctggtcgaggatggccggtagcagccgctggcgccacacctcgccgtcggcggcatcgcccaccagcgccgtggcgccggtctcattggcgacagcctgcagcggcgcttcgcgccgtccggtaataaacacccggtcgcccgcggcgcgcatcagccgcgcgcaggcggcgccaattccggttccaccgccggtaattaccacgactctcgccatccgcactctcctgtaatggggtttccgattaccttaaaaagcgcgtcaggtcccggctatcgcccggaagaacgatagccgtggtggttaatggatctcgctcacagggatcgcctgcggcgcaggcaccggcttcatggtggcggggtcgaccgccagatagcgcccggttttgctatcgataccaacataatcgatcattttgccctgcgctttggtaaccatggtgcgcttagcaaatgcctcgtaggcctcgctcatggctttgacccgatcgggatgttcggccgcgacatcatgcgtctccagcgggtcgtcgtgcagattaaacagctgccacggcgcgtcgccggcggtgaggccgcgcggcaccagccgtcgcagcttccattcgccatcgacccatgccgcctgatgatgcagttcaaccccgtagttgccgcgcggcggctcctgtacttcgccggtgagatagcgcttaaagctgacgccgatcatcggcaacaccggcttcttcgccagcgacttgttcggatcgatgccggcgaactcatatagcgtcggcgccacgtcatacaccgccatcgtcgaggcgtcgattttaccgtggcgggtgatcccgggaccggagatcataaagtcggtattgatgccgccctgggcgctggtggttttgtgataattggcgtagggggcgttgctgacgttggcccagtgggggccgtaggagacaaatgatcctttgcggccgacgttgtcatagctgttatcgaactgcttccagaattccggggtagattcgtagtagaaaccctgcgccgggttggcgccgttatcggttaaaaagaccagcagggtatttttatcgcgcccggtttgtttcagcgtctccatcagggtgccgatttgcgcgtccatattggcgatcatcgccgcatacacctgcatcactttcgccgtatatttctgctgctctggcgttagcgcttcccactctttatccagctccagatgcggcagcggggtatcgtcatggataattcccagcgctttcaggcgggcgatgcgctggcgatagacctcggcgtaaccctgctcatactggcctttgaagcgcttaatccactcgtccggcgcctgcaggggatcatgaggggcggtgaaggccagccaggcgaagaccggctgttccttcggcgtcgctttaatccagctgttcatctggcgggcgtaggcttcgctggagtaaaaatcatccggtagggagacgcgctcgccgtcgcgggtgtagtaggtgtggaaggcttcaacggtccccagcggtatcgcgtcgttaaagtggctggtgccgccgcccataaaggcgaaggcgtgattaaagccgcgatctttcggcgtggcgccgggaacaaaaccgaggtgccatttaccggccatcagggtgttataccccgcgtctttaaagcgctcggccatggtggtgacgcggtcggtcagccgcagctcgtagccctccttgccaatggtgctgtcgtaccaccacatgccgcccatcccagcctgctggttactgttgccggtgagcagcattgagcgcgccggggccgacatcggcgaggtgtaatactggctcatgcgcattccctgctcggccatcgcctgcaggttgggggtggggatctcgccgccaaaggggctgatgtccgagtagcccatatcatcggcgataatcacgatgacgtttggacgctcctgctgcgcggcgtgcgcgccaccggcgaggatcatgctgaccgccgcggccatggcttttttgttcacgactgactctcctgttcagagggggatatcatcagggtaaggcgctacgcagtatgcgcagtcccaacaaacgcggcccgccaggccttcaggccattaaggtcgcgggaaaaggggcgtaatggtgcgaggatgtcgctaaagaagcggtagtagcctccgcagaggcggttgttgcctgcggcgttgagatgcgccgggcagccgccctggcagaccatttttaccgagcaagtctggcattcgcggcgcagacttttctgctgaccgaaaggcagttgcaccgaggcgtcgaccgcggcggcaagcgtctgctcgtcaaggcggcccagccgatgttcggcgttgatcaggtggtcgcaggcgtagagctgtccgtcgagctccatcaccaggttgctgccgcagcgggcgctgtgcacgcagctgccgctggtatgagtgaaatactgcgcccacgcctgttcgatattgataacgaacacccgccctctatcgcagcgcttccgccactgtcgccagatgccgaccataaaacgtccccagttatcggcgctgagctggtatccttcgcgcagggccgcgccttcgctcatcagcggctgaaactgcagatagcgcgcgccgaggctgaccagccggtcataaatcgccgccgcgtgggccgccatctcgttatgcaccaccaccagcagattaaagtccacctgatgctgatggagcaggtcaatgccgcgcagcgccgccgaccaggtcgaccggccgcgtttatccggacgatggtagtcctgcagcgcttcgttgccttcgaggctcaacccgataataaagccatgttcgcggaacagtcggcaccatgcgtcgttgatcagcgtcccgttggtctgcaggctgttgctgatagtcacgccgtcgggggcatagcgcgcctgcagggcgagcgcttttttgtagaagctcaggccggccagcagcggctcgcccccctgccagacaaagttgatttcccgcgcgccggcgggctgggcggcaatatagcggcggataaactgctccagccgcgcgtcatccatcttgttgaccgacgtttcgtcctgcgggtaatagcaatagcggcaggcgagattgcaggcggggccaatcggcttcatcagaatatgaaacggcaccggcgagcgcggctcagcggccagcggaatttgctgctggcgcagggcggcgatattcagcatcggcttatcctcggttagtgaccggtactgttgatattattttggcaacagcgggtcaggcgtaatcacatgattaagccgcggcgaaaattaattgcatcctgttaagggtataagtgaaaaaaaacaaaaatccatcgttctttaggatgagaatcacgcgtcgggaataggttttttttatcaccaggggcaggtacgccgggtgttaatcttatttgtttatgttttaacgtcgctatcgtaaagcatggccggggtgttttttaaatgctttatataacaatgtattgctgaaaattttgtaacggctatcacattgttaatatgttaatgattgtgttacttaaatgtgaaatgtatgcttcaattatcagtagtcatccatgtgtcatgtaccatcatctcgacggggaggccctatcatgtctgctttgttaaaagccagccgtaatgatgcgataatagcccgttgtttacagactatttcccagttaattccactaacttcagcggtgttttatcgagtaaataatcgtttaaaacccgaaaactatatattgcataatatttccgataatacgcaccaacaatatctggaaaactttcagccgctggatccgcttctgccgtcgcactttagccaccagaacaccaccgtggcggcgatgacgccgcggctctgcgaccgcaaccggcattactatcatgaatttatgttgccgaataacgtgcgcgacatgaccgagatctttatccgccgcgagcggcggatcgtcgccggtatctcgctgatgcgcgacgtgcctttctccagcgaagagcgccagcgggcccaggcggtgctgccgctggtagagctggccatccgcgactgcctgcaggaagaagatgatctgcccgccatcctgacggcgaaagagcgggaaatcgtcggcatggtgcgcgaaggcgccagcaataagctgattgcccgccagctggatatatcgctctcgacggtaaaaacgcacctgcgcaatattttcgccaagaccgaagtggtcaatcgtaccgaactggtttcccgaacctggatgccggccgctcagcgtacgctgcatctgtaatctgactttcgcatcccgcgcgcgccgtggcagcacggcgttttcctgatgcctgtgggtatcactccctggaggatcctccggggggaggcttttttgaccggagcacgccctacgatgtcgagtacacctctcactgataatgcgctttcccggcccgccgggctggtggtgtccctgcgtttgctggcggcgatcgtgatttttgccgctattgcgccgggtattctgatgaccgcgccggcggtagcggcgcagctggccagcgaatggcagctaaaacccgggcagatcggctggctgttctcagcggagctgggggcgatgagcctggcgacgctcccggcgtggtggtggatgagccgcctcgactggcggcgggttgccctgacggccggggtggtgtttctggccgccaacctcgcctcggcggtggtcacccagtatgagacgctgctggcggcgcgctttatcgcctcgctggcgggcggcacgttgatgattttgtgcatcagctgcgcggccggaacgccgaacccgtcgcgggtctacgccttctgggtgctcgggcaactgctgttagggatgcttggcctgctggcgctgcccggcctgttcgcgacctttggcctgaaggtggtgtatctgatcctcgccgccatcatgctctgctgtttgccgctggtatccgctttccctccgcgctttcaaccgctttcagtctcccgccagcagccgtcgacggcgctgtggcgtcaggcgctggcggtgctggcggtgctcactttctatatcagcctcagcgccgtgtggacctttatcggcaccatcggcagcgcggcggggctgagcccgacgcaggtcggtctggtgctggcggcggcgacggtttgcggcattatcggcgccggcggcggcgacggtttgcggcattatcggcgccggcggcgcggccctgcgcggcacccggcgggccgatcttttaccggtgtggctgggctacggcctgttgatcgtcagcgttgggctgctgatcggccagccgctgctggtgcgttacgccatcgcggcgctgctgtttaagttcacctggaccttcgtgctgccctttattctcgcccgcgtggccgggctcgataacagcggtcggctaatgaacagcatcaatctggtgatcggcggcggcatggcggctggcccggcgcttgcgggggccttactgcaacacttcgccagcgccgacccgctgctggcggcggcaggcgtatgcgcgctgctgtcactgattttaattgtggcggcatccgccgccgggaaggcttagcccacgggaggatagagtgaaaagaaaaaccggtttcttttttgatgaacgttgtttctggcacagtaccggtctgcacgcggtgacgctgccggtgggcgggtgggtacagccgcccgccggcggcggtcatgctgaatcgccagagaccaaacggcggatgaaaaacctgatggatgtctccgggctgacgccgcagctggcgctgcgcagcgcggcgccggcgagccttgaggacctgcggcggatccaccccgacagctatctggagcgcttcaaggcgataagcgataacggcggcggcatgctcggcaaagaggcgccgctggggccgggcagttatgaaatcgcctgtctttccgccgggctggcctgtgcggcggtggaagcggtgctgaagggggagctggataacgcctattcgctgtcgcgcccgcccggacaccactgcctgccggaccagtcgatgggattttgtttcctcgccaatattcccattgccgtcgagcgagcgaaagcgcagctggggctgggcaaggtggcgatcattgactgggatgttcaccacggcaacggcacccagcatatctacctgcagcgcgacgacgtactgactatctccttgcatcaggacggctgcttcccgccgggctacgccggcgaggacgatcgcggcgtgggcgcgggcgaaggttacaacatcaatattccgctgttggccggggcgggggatgacagctggcgctatgcgctggaaactatcgttattccggcgctggcgcgttttgagccggagctgatcatcatcgcctgcggctatgacgccaacgccatggatccattagcgcggatgcagctgcacagcgatagcttccgggcgatgaccgaacaggtccagcaggcggcggatcgcctgtgcggcgggaaactggtgatggtgcacgagggcggctacgccgaatcctacgtgccgttctgcggcctggcggtgatggaagccctgagcggcatccgcaccgaggtccaggatccgctgctggaatttattcagcagcagcagccgcgcgccgcattcgcgcagttccagcgcgaggccatcgatcggctggcgcagcagtttggtctgctataaaccacctcagcttccccgcggtgatggcggggaagtcaatgctttctcttctgcgatttcaccgcgcatccactgacttaccgcctgattaaccatcgccagcacgctgagcagcagcatccgctgctgcgcttccagccgcagataacggcgcagcggcggcattttacagaccacttcgctggcggcccagggttcaatgctgcagcgccagccgctactatcaaaggtcagcgaaaagcggcggtaatccagctcgcttaaggtctgctggagattaggaaaaccgttgagatagccggcgagttcctcgctgcctttgccgccgataaagcggatcggctggcgtttccaccagccggattgatgggcgcggatcttgccgcgagcgggccgggtcaccggcccctcgacgacaaactcgcagctgtgaatgctggccataaacagccgcttctgacgcacgctgaaggtgacggcggtggcgtcgttcaagcgcagcagcgcgctgcgttcgctcagcttttcgctgggccagcccgccagatcgcgctgcaccgcgttcattaacggcgtttcaaaccaggggacggaggacatctggcgtcatctccccgcgggtctgtttttcataattgttgatggcgcgctccaccacctcttccactaccagcggcttgaacggattgacgcgctgcacgcacaccgtccagaacagggcgtaagcggcggtcaggccgagcattatgccgaacggcaccagcacctggcggctgtccatcccgggcggcgtgatattgacgatagcgatgatgatcccgacgctggagataatctgcggcagcgggaaccacggcgagcggtaggcgcgcggcagatccgggcggcgaatgcgcagcatcaccaccgacagagtaaccagcagataggcgacgccccaggcgcagaccgcggcgaggatcagcggcacgatgcggtccagatcgccgttcagataccaggcgtgcaggcaggggatcgccaccccgatggcaatggcgatcaccggcgtcttaaagcgcggatgcagccaggtcaggaaacggggcagcgcgccgtccagcgccatgccgtagataatacgcggcacggcggccatcagcgtattgatggtggcgcagccggccaacagtagcccgacccccagccagtactggccggcgtggcccatcacccgttcggcgaaggccgggatcgccatcggtgtatccagcagatggacgttgttggccgcgtcgagcacggtattctccacctggcggttgatcgccgcgccgtagataaacatgcagctggcgacccccagcaggcccagcgccatcgcccgcggtatggtgcggtgggcctgtttgatctccggcgccatcggcgtcaccagttcgcaaccgacgaacataaacatcgccatgccgatatagccgaacaggccgttgatatcgctaacgttcagcggcgtgccgaaccagccggaaagatgagtcaccggcgccataaaaatgccgcacaggccgaaaatggtcagcgtggtccacatgccgaaggtcagcaccacttcgaccttgccgaagatttccacgccgatggcgttgagcaagccgaaaatcaccaccatgccgacgcccaccatccaggtattctggtgagcggccatctgggcgttaatcgactcgaagttcaccagcgccataatgcccgccaggatcgtctccgccgtcccggcgaagatatggacgatcagataggcgcacagcgcgccggtgatagcgaagaagcggcccatgccgcaggagatatagtcgtacaccgaaccggtggtgggaatgagcgtcgccgcctcggcaaaggtggtgacctgcgcctgcatcataataaaggccagcagcaccgccagcgcgaaggtatcaccgcccatgccgaagccgctggtgaccgtcaggatcaccgggctggccatgatcagcccgacggagctggcgagggtggtcgggaagccgacgacgccgcgctcaagatggctggcgagtctgttactaaacatagtcaacctctgcacaataatggggtagggcagggaatagccagcgccactcccggatagtcataatttaggcgggcatcctgctcaacgaatatcgtccggaaggtggagggcggcgcatgattctgtgacgcagtcgatgaatgtcgcggcggataaacaatatgaccccgaaaaccggggccatccgtcttgccacgttgcgcctgtttctgccggatggcggctgcgccttatccggcctacggtccgtgcggcctgcctttaatttggcctcaacccccccccgtgggcgctgccgcttaccggggctacagcgctgtgcgatttggtagcccggagaaggcgtaatgcgccgccgggcattatcagtttgttagcgggtctcgacgttcgccaggtagtgcttcacaaagcgcggcgtcagaattttccactccacttcggtgccctgtttaacaaaccagctgtcgcccggcgcaaagcgctgcggctcgccgccggcgacggtcagctccacttcgccctccagcacggtggcgtgctcggtaaacggataggtcatggtaaagctcccctcagtggacgaaaacagtccgcaggtaaaggcgtcctgcggctcgccgtagatcatcgcgcccgctacctgcgggtcgccggcggtcggcgtcgcgccgagcaggctgacgctgccgatcggctgcagatcaggtaccgggtgtttaagtttaaaagcgtgcatagcgttctcctggttaactccggcctttccagaaaccggcggtttgatgcatcagttttccggccgtgactaatagcaagcgcagactgtcacgaccgtggatggtcgcgtgggggatgctgctcagcaggcgatagcggtcggaaccgccgttgatcccttcggcgaggattttgcacacgatgtgcgacggggtgacgccgaagccggagtacccctggacgtaaaagacgttgttgtgatcgcgtagggtgccgatctgcgggaacagattggcgctacaggccatcggcccgccccacgcaaaatcgatcttcacatccctgagataggggaagacctccgccagcaaggtgcggttccaggcggcgaaatcgttcggcgtatactccacaaagcgggtggcgctgccgaacagcaggcggttttcccgggtgacgcggtagtagttaattaccgggcgaatatcgctgaaggcgccgcgcagtgggctgatgcgttcgatcagttcatcggagagcggctcggtcgacacctggtatgagtaagtgaccagcgtcttgttgtagatctccggctccatattgttgaggaagctgtcgcaggcccatagcagtttggcggctttgacgctgcccatcgcggtgcgtacccgcacctgtttgccgtaattcacttccaccaccggcgaggattcgaaaatcttcacccccagcgaatgggcggcctgcgccgaaccgagcagcatattgagtgaatggatctggccgccgcccatatgtttcagcgcgccgcagtagacctcggagcccaccacctgctgcacctcttttccggtatacagttcgatctcttcatccggggtagcggctttaaactccttctcccactggcgcagcgttttaagctgtcgctggttataggcgagatagccgtagccgggcacgaaatcggcgtcgatgttgtatttgcggatgcgttcgcgaatgatgcccgcgccgaggttggcgattttaaacagcgtctccagcccctctttgccgacgtgcttttttaccgcttcgatatcgtggccgataccggccatcacctggccgccgttgcgcccggtgccgccgtagccgagatggcgcgcctccagcaccaccacgttggtgatcccctgttccgccagctcaagggcggtgttaataccagagaagccgccgccgataattaccacatcggcttcaatatcttcccgtagcgccgggaaatggaggtgatatttcttcgtcgcgccgtagtagttcagcgcatcgatcttgatgttcatcgcgttaccctgtggtcttgcctggctcaagaccctcatcacagcacgccgcgcgggcgttgaatatcgtccggaagaatgacgttctttagaacgataggctgcggcgggaagccgtgctgtgatgggttaactttgctgaaaaacgggtgctgacgatgagcgagataaccttactggcggaagtgaccgccttcttacgccagccgcacgggcagtttattgccggtcaacgtgaggcgggccgcggcgcgccgttcgcggtgatcaacccggcgaccgggcgggcgattgccgaggtcaccgcggcggatagtgaccaggcggatcgcgctatggagagcgcccgccaggcgtttagtcagtggcgcgagatgccgacgctggcgcgcggcgcgctgctgctgaagctggcggacacgctggcagagcatcgcgaagcgctggcgcagctggaaagtctctgttccggcaaaactatcacgctggcgcggatgctcgagctggaccagtcggtggcgttcctgcgctacttcgccggctgggcggggaaagtcaccggtgaaacgctggatgtctcgctgccatcgatggccggggagaaatataccgcctttacccgccgccagccgctgggggtggtggttggcatcgtgccgtggaacttctccatcatgattgccatctggaagctggcggcggccctggtctgcggctgcaccatcgtcctcaagccgagcgaatatacgccgctgacgctgctgcgcgtggcggagctggcaaaagcggtgggtatcccggatggggtgattaacgtggtcaacggcgccggcggcgagattgcccagcggctgattacgcatccggcctgcgccaaggtgagcttcaccggctcggtggccaccggggaaaaagtccagcagtcggccagtgcgtcaggtaaacgggtgacccttgagctgggggggaaaaacgccgcgctgttcctcgatgacctgacgccggaggcgatggtcaacggcattattgaagctggctacctgaaccaggggcagatttgcgccgctgcggaacgtttttatctgccgcagggaaaactggatgcggtactggcgctgctgaaagacaagctcagcgcttttgcgccggggtcgccgctggatgaacggacgctgatggggccgctggccaaccgccagcagtatgacaaagttttgcggctcattcagaccgcccgcgacgagggcgataccatcgtctgcggcggcgaagcgctgccgggggagggctatttcctgcagccgaccgcggttaaagtgcgcagcgaagagagtactctgatgcgcgaggagaccttcggcccggtatgcagctttatcggctatcgcagcgaagaagaggcgctggcacgaattaatgcttcgccgtatggactggcggccagcgtctggtcggataatattcgtcaggcgctacgctactcggaggcgattgaggccggcatcgtatgggtcaatatgcataccttcctcgacccggcggtaccgttcggcggcatgaagggctcgggcatcgggcgcgaattcggcagcgcgtttatcgatgattatacggagctgaagtcggtgatggtgcgatattaatcgccgttcagcgacatagcgctgtcatgtgtcgctttgcgccagataggcaacacattgtgtgccttctggcccgcaacccgggcggtgcacggcatcgcttccgggacgcttttcccgtcacggatcctttcttcccctcctaatccgccattgccgtaaaaaaatcagcagattatcttttttgcccgccaggacttgtttgacattagataatgagtatagttctcattctctttttcattcgtaattttggcaaggttcgagctgcgccagtgagtcgttcactaagagtcgcgaaggcgtagggtgacgtaaagacagcaggctggaaacacacaatatcggccgctgcgcgtccatcgggtcattgattttttatagggttgatccaatgaaatacacacttccggcgttgacgctggccatcagcgcggcgttaagcggctgcgcgacgcctcattcctctgccgtttcccaaccggttgtcgactcgccagtccctaacgtggcgcaaccgctgcagcgccagctagcggaagggctgtacgagatggcgttaagcccgcagggtgatgcgctgtacgtcgccagcgctgaaggctttaaaaatgtacagggcggggcggtttacacactggatccgcacaccctcaataccatcggcctgacgcataccgatctgaaaaacttcgctttacagctctctgcggagggtaaaacgctgtatgtcagcaattcgctggacggcggcatcagcgctatcgacaccgccaccggcaaggtaaaaaaccgcctgctgttcagcgagcgcaatgaaaaaggtcgcccttatggggcccgtcagctgctgttgctgaataatactctctacgttggcgcggtcgcgacccggcgcaaatctgggtggttgacgccactaccctgaagctgaaaacgcggattaaaaataccggtaaatggatgaccggcctgcactactccgcgcaaaccggtcgcgtgtacgccgctaacggcagcggtgaaattctggtgatcaacccgcgtaaccaacgcattgaacagcgctggaagccgctgggcgacaagccggcgctgctgcttaatatggccgaagatagcgacaccggccgtctgttcgtgaccgacaactcgaaagcgaaaaccactctggtgctggatatccacagcggcaagctgcttaaacagctcgacgtcggcgattcgctggcggtgcagttcaataagaaacgccacgaaatttatatttcacagcgtgaatccggcaaggtcatcagccttgacgccagccgctacacgctgaagaaaagctgggcgctgccggccaatcccaacagcctgctgctttccgccgatggtcagacgctgtttgtcaccgtcaaacagcccttcaataaagaccactccactaaaggcccggacagcgtcgtacgtatcgacctgaacgcgcaataaaaataacgggtccggcgacgggccctttgattcatttatcctcatccatggggcaaattatgcacaccacgcactattcatccttcccgctgcgtaaaacgctgctggccttagccatcggcgccgccagtcaaacggcgatggccgcggacgctgccgccgcgaagcagcctggcgaagagaccctcatcgtcgaggctaacgaaaccagcgattttaaatccggcggcgacctggtggttccggcattcctcgatggccagatcgcccacggcggccgtctggggatgcttggcgaacaaaaagcgatggacgtcccgtttaacgtcatcggctatacctcgaagctgattcaggatcagcaggcgaaaactatcgccgatgtcgtcagtaacgacgctggcgtgcaggccgtacagggctacggcaacttcgccgagacctatcgaatccgcgggtttaagctcgatggcgatgacatgacgatgggcggcctggcgggcgtggtgccgcgtcaggtgatggacacccagatgctggagcgcgttgaaattttcaaaggggctaacagcctgcttaacggcgcggccagcagcggcgtcggcgggatgattaacctcgagccgaagcgggcggaagatctgccgaccgcacgcgttggcgtcgactatacctctgattctcaggtgggcggcaccctcgacctggggcgccgtttcggcgacaacaaccagttcggcgcccgggtcaacctggtgcaccgcgagggtgaaggcgctatcgataatgataaacgccgtaccacgctggcttcgctggggcttgattaccgcggcgaccgtttccgctcctcgctcgatttcggctatcagaagaaaacgttccacggcggtacgatgggcgtcaatatcagcggcgtggatttcattccggcgctgccggacaacagcaaaaactacagccagaagtggggctatagcgatattgaaagcgagttcggcatggcgaaggcagaatatgacctgaccgatagctggacggtatacagcgccctcggcggccagcattcgcatgaaattggtacctacagcgcgccgaagcttctgaataaaaacggcgatgcgacggtgggccgcctggatactaaccgcattatcgacgcgatcagcggcatgggcggggtacgcggcgatttcaataccggcgcgatttcgcataaggtgaacctcggctatgcggcgcaggtgcataccgatgcgaccgcctggcggatgtcggccaggaacccgaccactaatatctatgacaaccatgatgtggcgatgccggataacgcctattttggcggcaactaccacgatccgctgatcacctcgcgcagccgtacgcagggctggctgctgagtgataccctcggcttctttaacgataaagtgctgtttaccgccgctgctcgtcatcagaaagtggttgtgcgcaactacagcaacgccaccgggctggaagatacctcttcgcgttatacccaaagccgctggatgccgacgtttggcctggtgtacaagccgtgggagcagctgtcgctgtatgctaaccataccgaagcgctgcagccgggctctgtggcgccgacgacggcggccaatgccgggcagagtaccgggatcgcgcactcgaagcaggacgaagtgggcgtcaagatcgactacggtacgatcggaggatcgctggcgctgtttgaaatcaaaaaaccgaacgccatttccgataccgctggcaattacggcctcgacggcgagcagcgtaaccgcggcgtagagatgaacgtctttggcgagccgatgctgggactgcgtcttaacgccagtaccgtctggctggatgccaaacagactaaaaccgctgaaggcgcaaccgacggtaaagatgccatcggggtggctaacttctacgcggtactcggcgccgaatatgacatcaagccggtggaaggcctgaccgccaccgcgcgcgtcaatcatagcggctcgcagtatgccgatgcggccaataccaagaagctggatagctacaccaccctggatttaggcctgcgctatcgtatgcgtctgaacgccgaccagaacgaaatgatctggcgcgtcggggtgaccaacgtgaccaacgagaagtactggtctggcattgacgataccggtacttacctgttcgaaggcgatccgcgtaccgtccgcgtctcaatgagctacgacttctgacgctaaaaaaagcggggcgggcggctgacgctcgccccacgcaacttgcgacaatcccccctaagtgataaaaggtgccccttcacaaaaacacacaggggaacgacgtgaaagacgcgtcaacgtcgtcggagaccgtcacggaaagtggcccgacgcttcatcgcggtttacagaaccgacacattcaacttatcgcccttggcggcgcgattggcaccggcctgtttctcggcattggtcccgctatccagatggccggtccggcggtcttactgggctacgccgtggccgggattgtcgcttttctgatcatgcgccagctgggcgaaatggtggtggaagagccagtatccggttcctttgcccactttgcctataagtactgggggccgttcgccggctttctctccggctggaactactgggtgatgttcgtgctggtagggatggcggagctgaccgccgccgggatctatatgcagtactggcttcccgacgtgcccacctgggtttgggcggcggctttcttcatcattattaacgccgtcaacctggtcaacgtacgcttgtatggcgaagcggagttctggttcgcgctgatcaaggtgctggcgattatcggcatgattgccttcggcctgtggatgctgttcggcggccacggcggcagcaaagccgggttcgacaatctgtggaaacacggcggcttcctcgccaccggctggcacggacttattctgtcgctggcggtgatcatgttctccttcggcgggctggagcttatcggcatcaccgccgccgaagcgcaaaacccggaaaagagtattcccaaagcggtcaatcaggtggtctatcgtatcctgctgttctatatcggttcgctggtggtgctgctggcgctctacccgtgggtggagatcaaatccgacagcagcccgtttgtgatgattttccataatctggacagcaacctggtggcctccgcgctgaacttcgtcattctggtggcctcgctgtcggtgtataacagcggcgtgtactccaacagccggatgctgttcggcctgtcggtgcagggtaatgcgccgaaatttctcgcccgcgtcagcaagcgcggcgtgccggtgaactccctgctgctctccgggattatcacttcgctggtggtggtgctgaactacctgctgccgcatgaagcgctggggctgctgatggccctggtggtggcgacgttgctgctgaactggatcatgatctgtatggcgcacctgaagttccgcgccgcccagcgccgcaaagggcgcgaatcgaagttcaaagcgctgctggcgcccgccagcaactacttctgcattgctttccttgggctgatcctggcgctgatgtgcactatcgacggcatgcgtctgtcggcgatcctgctgccggtgtggatcctgttcctgtttatcgccttcaaactgctgcgccgcccggcgtaagcgagatgccccgccgtccggcggggctgcctgcctttttattgtgatcctcttcgcaggcggcgcatttgcctggcgatcttctttttgtaatcgattacttttgttttgagcggttttgtaatcgattacttttctgagggcgagcaacatggtcacaacaacagaaggtcgggaaagtgcccgcgtgagccaccgttttctggtgccgcggctgtcgttaatgatgtttatgcagttttttatctggggcagctggtcggtgaccctggggctggtgatgacccgctatgagatgtcattgctgatcggcgatgcgttctccgccgggccgatcgcctcaatcttgtctccctttgtgctggggatgctggtggatcgctttttcgcctcgcagaaggtgatggcggtgatgcacctggccggggcggcgatcctgtggtttgtcccgcaggcgctggtggcgcagaacggcgccctgctgattggcctgctgttcggctatacgctgtgctatatgccgaccctggcgctgaccaacaatatcgccttccacagcctggccaatgtcgataaaaccttcccggtggtccgcgtgttcggcaccatcggctggattatcgccgggatctgcatcggggtgaccggtatctctgataccaccggcatcttcacgctggcggcgctctgttcggtcgcgctggcgctctacagcctgacgctgccgcacaccccggcgccggccaaaggcatgccggttcagtttcgcgacctgctgtgcgcggacgccttcgcgctgctgaaaacccgccatttcctgattttctccctctgcgccaccttaatttccgtgccgttaggcacgtattacgcctataccgcgtcgtatctggcggatgccggcgtcaaagatgtcagcaccgcgatgtcgttcggtcagatgtcagagatcgtctttatgctggtgatcccgttgctgttccgtcgcctcggggtgaaatacatgctgctcatcggcatggcggcgtggttcgtccgctacgcctttttcgctctcggagtcagcgaggaggggcgcttcctgctctatctgggcattttgctgcacggcgtgtgctatgactttttctttgtcgttggctttatctacaccgaccgcgtggcgggcgagaaggtaaaaggccaggcgcagagcatgattgtgatgttcacctacgggatcggcatgctgctgggctcgcagatctccggcgcgctgtataaccatctggtggccggccagagcgtgcctcaggcctgggtgaccttctggtggatcccggcggtggccgccgcggttatcgcgctgattttccttttctctttccagtacaacgagaaagagccgcactaatttttcaggagggggtatgaaaacgattaagggaccgggcatttttctggcgcagtttatcgggacgcaggcgccgttcaacaccctggcggggatagcgcagtgggccgccggcctggggtacaaggcattgcagatcccctgcaaccacccggcgatttttgatgtcgagcgggcggcggcgagccagacctactgcgacgaggtcagcggcatcctggcggagcatgggctggtgatcagcgagctgtccactcaccttgaaggacagctggtggcggtgcatccggcgtatgacgcggcgtttgacgcctttgccccggcggcgctgcatggcgatccgcaggcgcgccagcgctgggcggtggagaaagtgcgccaggcggcggtagcctccggccgcctggggctgcaggcgcacgcgaccttttccggggcgctggcatggccctttttttatccgtggccgccgcacaatcagccgcttctggatgaggcctttgccgagctggcccggcgctggcggccgctgctggacctcttcgacgagcagggggtcgatgtctgctatgagatccaccccggcgaagacctgcacgatggcgtgacctttgagcgttttcttgcgctggtggataaccatccgcgctgcaatatgctctatgacccgagccacctgcatctgcagcagatggactacttggcctatatcgatatctatcatgcgcgtattaaagcgtttcacgtcaaggacgccgaatttcgccgcaacgggcgcaatggcgtctacggtggataccagccctggcagcagcgggctggccgtttccgctctcccggcgacgggcagatcgacttcaaaggggtgttcagtaagctgaccgagtatgattttgccggctgggcggtgctggagtgggagtgctgcctgaaggatagtgagaccggcgcgcgcgagggcagcgagtttatccgccgccatatcattcccgttgccggacgggccttcgatgactttgccgccggcgggagggaataacatgattcaggtcgcgattatcggggcagggtttattggcccggcgcatctggaggcgctgcggcggctgggagatgtcgaggtggtggcgctgtgcgacagccgccttgaggcggcgcagcgcaaggcgcgagcgctgaacattgcccatgcctacgacagcgtggaggcgctgctggcccatccggggctgcaggtggtgcataactgtacgccgaaccatttgcatgcccagattaaccggcagatcctcgccgccgggctgcacgtcttctcggaaaagccgctgtgtatgacggcgggggaggcgcgggagctggtggcgcttgccgcccgggccggcgtggtgcatggcgtcagcttcgtctatcgccagttcgctatggtccagcaggcggcggcgatgatccgccatggcgaggtcggcagaatcttcgcggcccacggcagctatttacaggactggatgctgctggagaccgactacaactggcgggtcgattcggcgcagggcggcgcgtcgcggacggtggccgacatcggctcccactggtgcgataccgtgcagtttatgaccggtcggcggattgtcgaggtgatggcggatctgtctatcgtctggccaacgcgtaaagcgccggtcaatggtaaagcgaccttcagcgccgttcacgaggcgcaggcatatgaaacgcggcctgtcgataccgaggactttggctcggtgctgttgcgttttgacgatggcagcaaaggcagctttatggtctctcaggtgagcgccgggcggaaaaaccgtctggcggtggagattaacggcagcctctgttctctggcctgggatcaggaagtgccccagcggctgtggatcggccaccgcgagcagccggatcgcctgctcagcgatgacccgagcctgctgcggccggaaatcgctgacagcgcccattaccccggcggccatattgagggctggccggacgcctttaagaatatgatggggcatttttatcaggcggtgcgcgccgggaagatgccagcggccggggcccggcgcttcgccgctttcgacgacggcgccgatgtgatgtacatcatcgaggcgattgtcaaaagccatcaggaacagcgctgggtcagcgtcgaacgctgagcgcaggtggggcgcaggattatttcaccccaagatagccgtcgagataggcaccggagagctcgttgccgaacaggacggcatctttattttccatcgcattatcccatttgtcgctggcattgccggtgaaggcgtgctcggtgcgggtgccctgcgccgcctgctgtttgatggcttccgcggtgcggcgggcatcgctttcgctcatgccagcggctttatcctgctggccgcgggcgtacattgccgtgaaggtcggcaggtttaaacggtaattttcctggcggttgacggtgaagttgccgccgacaaaatcggaccggtgggcgacgaaggcgtaggcatggcgttccggtgacgattttgacgaggtgcagccggtgatcgttgccagggcacagctgagggcgagaaccgcggtggagagcctcatggggatatcatccttaatcataaaagaaaaaatggggcgcaggcggtctgttgcgcctcctgcgctaatgagaatatgaaacggcaaaaggatgcgcgttaacggggcgggagagaagccctgattattaatagtttcccgggacaccgtctcgctgagctacgctttcgcgccaggctggcaggccaatcagaggtcatttatgatagcctgcaggatccacctctatcgcaggaagtgcagggtttatgtctattcagaaaattgctcgtctggccggcgtctcggtggccacggtgtcgcgggtgctgaacaacagcgatacggtaaaagccaaaaaccgtgagcgcgtactgcaggcgatcaaagagagcaactatcagccgaacctgctggcgcgtcagctgcgaaccgcccgcagcaatatgatcctggtgatggtctccaatatcgctaaccccttttgcgccgaggtggtgaaggggatagaagaagaggcggagaagaatggctatcgcattctgctgtgtaactccgggtcggatctggcccgctcgacctcgggcctgcagctgctctccggcaaaattgtcgacggcattattaccatgaacgcgctctccagcctgccggaactgaccaccatgattggcgacgcgccctgggtgcagtgcgcggagtatgccgacaccggcagcatctcctgcgtcgggattaacgacgttgaggcggctcagggggcggtatcccggttggccgatagcggccgccgccgcatcgcgctcattaatcacgacctcagctatcgctatgcccgtctgcgcgagcgcggctataaaagcgtgctgcacgtgcacggtctggcgtatcagcaggtgacctacgcgcaggatcttagcgcggcggccggtaaacgggcgatggagcaactgctgtcgcaagacgagaagcccgatgcggtgtttgccgtttcggactccctcgccgccggggcgctgcgggctatcgcccaggccggactgcgggtgccggaggatatcgcggtgatcggcttcgatggcaccgagctggcggaagtggtctccccgcagctgaccaccgtcgaacagccctcccgggcgatcggccgtacggcggtgtctctactgatgaaacgcatcgacgatcccgacgctgccgtcgagcgggtgatgatggactggcgcgtgatagaccgcgccagcgtctgaggatcagcgggagaaggcgccggtcagcgcgcgaatatcgttgccggtgggcgtttgatgaatgcgtaagccaaactcatccaccacggcgaagacatggtcgaaaatatccgcctggatcccctcatattccgcccataccacggtgttggtgaagcagtagatctcgatcggcaagccgttggcatccggcgccagctggcgcaccatcagggtcatatcctggcggatgcgcggatgatggcgtaaatactcctgcagataggcgcggaaggtgccgacattggtcatccgccgctcgttgaggatcgattgctccccggcgtactgctggttccaggcgcttatctcttcgtggcgtgaatccatatagggtttaagtaacttcgcccggatcaggcgctgctgctcctgttcatcgaggaaatgaatgctggtggtgtcgatgttaaggctgcgtttgatgcggcggccgccggaggccgacatgccgctccagtttttaaacgagtcagagaccagcgaccaggtcggaatggtggtgatggtattatcccagttgcgcaccttgaccgtggtgaggccgatatcgatcaccgcgccgtcggcgccgtactttggcatctccagccagtcgccaagcttgagcatatcgttggccgagagctgaataccggccaccagaccgaggatcggatctttaaacaccagcatcagcaccgcggccatcgcgccgagcccgctaatcaggatcgctggcgactggcctatcagtagcgaaataatcagaatgccgataataatcgccgtcaccagcttaattccctggaatatgcccttcagcggcaactgtgaggcggcgggaaatttctgcgccagctttaaaatgacatccagcagcgagaagaaggacagcatggcatatatcatcacccacagctgggccacggtggttaatatttccgcggcctcgctgcctttttgcagccacagcaccgcctggacgttgacgatgatcccctgcagggtaaaggccagtcggtgaaagagtttattctgcgtgatgatttgcagccacagatggctgctggccagcgcccgtttttcaaatgcgcgcaggaccactttgtgcaatatcagatgcacgaccacggcggtgaacaagataatgccgaagataatcatcagcgagcgggtgggggttatttcgattcctaaggcggcaatttgcgatattaattcctgcataacgtctcctgaatatccagcgggtatgatgaccgctggatagctattatgcaaattaccgccgccggtattacgaggccaccgtcgccggctgtcggttgagatgatggcgtagccacagcgctatcgcccccagcaacagcatcatggccacctcgaccagcagaaaatcaatcagcgcctgcggatagtttccgccgccgcgacgggccagcgccaggaacagcgaaccaaggatagccggtccgagaccgagggtcgcctgctgcagggtgctgaggattgcgctcccggccccggcgtcgctggcgctgatatcgcgcataccaatccgataaaagctgttgacgatcagcgcctggccatagccgatcagcgccgtggcgggaaccagcgtcagggcgttggtggcgacgccgaagcgggagaaggtggcgcacagcagcaggagtccggcgatctgcaccgccagaccggtcagcaggatccgccccatgctgtagcgggcgataagccgcggggcatacagcgccgaaataaaataggccacgccgagggcgatgaagctattgccggactgccacggcgccatccccagcccctcctgcatggtcagcgccatgcagaacataaagccggaccaggcgctgaaaaacagcagggcgatggccatcccgaagcggatgctggtcaactgcagcagacgcggcggcagcagaggatggtcgccacgctgctgctggcgcagggcgctctgacgcatggcgaacagcagcggcaggaccgccaccagcatcagctgcagccacagcggccagtgcagctccggaccgagggccatcgggaacagcaggcagcagaggatcagcgcgaggtacagcgtaccctgccagtcaatccgcgacggcgtctcgcgacgggtttccggcacatagcggcggctcagagccagcaccagcaggcagatcggcacattgataaaaaaggcgttgcgccagcccagcccggcgatgtccgccgacaccagccagccgccgcccatctgaccgacgataaaggcgatcccgccgatcccgccatacaggctgatggcccgggcgtgggcggggcctttgagggtgacgtgcagggtcgcgaggatctgcggcacaatcagcgccgccccggcgccctgcagggtgcgggccgccagcagggcgccgatgctgttcgccatcccgcacagcagggaagcgatgccaaagagggcgacgccccacataaacaggcgccggcggccatagttatcgccaagcttactgcccatcgccaggcagacggcaaaggcgacgccgtacagcgcgacgataagctccagctgcgtggcgctggccgccagggtgtgggtgatggcgtccagcgccacattggtgatcgaggtatcaataagcggcagcatctggccgctcagcagcagcaacagaccggcgcggccgggtgaaacagcagacgtattcatgggattctccattgcgtcattcagcagaccgacgtagcattaccgataaattaaacgggtaccagttcctgtctatactggtattggcactactatgctggaggggtgatgaccacgatgccgcaacgggagtcgacgatcgccgtgccggacgatcgacgcaaacagctgggggcctttctgcgcgcccgccgtgaaagcctcgatccgcagcgcctggggttgccccgggtgggccgccggcgcacgccgggtctgcgccgggaagaggtggcgatgctcgccgacgtcggcgttacctggtacacctggctggagcaggggcgggaggtgaatccgtcggaggcggtgctggtgggggtggcgaatgccctgcagtgcagtccgctggagacccggcatctgttcgtgctcgccgggctgaccccgccggaagccacccaggtgacggtgtgcgaaggcatcagcccagggacccgccggatgctggacagcctgatgccgcagccggccagcattcagaaaccgaactttgatattgtggcgtggaacgacagcttctgccgcctgatgggcatcgatttcgccaccctcccggaagaagatcgcaactgcatttatctctatctgacccatgagacctggcgcagccggatcgaaaatcgcgatgtgctgccgaccttcgtctcctatttccgcgccgcgatggccgagcaccgcggcgatccggcgtgggaaaacaaactggcgcgctttttcgccgcctcgtcggagtttgaagcgctgtggcatcagcgctacgaggtgcgcggcgtggaaaaccagattaaacattttaaccacccgcagctcgggcgattcagcctgcagcagatgtactggtattcggcgccgcgcaacggctcgcgcctgctggtctacctgccgatggacgaggcgggcgagcaggcgctggcgtggctggaccaacattaatcacagggaatcagatggctggcaatgtgccatcttcgggtattgcccggccggcgctgctggacggttccctctccctccgggagtaggggagggaaagcactgtcgggaagtcctgtatgtgatctacgacttcagcacacattgcgctcccgatacgccttctgcgttatgtcactcatggcgcagggagcgcacagggggcggccagtcgccgccgccccctgtacccccgggctccggccagcaacatcgccgctgcgcggtaccttcgacttttccctgcaggcttcgggtcgggccgaggcagcgtccgtgcaaaacacggccctcagcccgcatccatgcgggctgccccggcctgccgggaacgtctcagcgatgttgaggccgcaacaccggcagtttcagtcgcacaagtggttaagttaacggctggctgctgcggaccgtaggccgggtaaggcgccagccgccacccggcaataaagcggctccgtgcctgatatcatgctcggcggcgctgcgcttacgcgggcttacggtaaggagtaacaatctgatatataaatggttaagtaggccggggagggcgacagccgctgcccggcagaaaggcgagcatattagcgaaaacaggtttgtcatcagtcccaaggaatgcctatgaacgtaacccgaaaagagcagcgcattattcagcgcgcgctgaatgcctggcaggccagcggggagttaaccccctcggacagccagcggctggcgcaaacgatgcgcgtctcccccttcgactggcggcgcctgagccgctatgccttctggaccgcgctggcctgcgtgctgatttccctgggcagtctgttcgccgacagcgagctggtggcgtggctgctgagcctgttcagccactcggcgctgatgcggatcctgctgcctgcgctgctggcagtcgcctgctacggctggggttttcgtcgccagcggcgggagacgcagtggcactacagcaccgaggcgattttgtttctgggcgtcgtctttaccgccgtggcgctatggcagcttggcgaacggctggataacggcagcggccatatcgcaccgctgtttctggccggatgcgtgatttacggcgccatcggctatattgcccgctccgggctggtgtggctcttttttctgctggcgctgggcaactggttcggcgcggaaaccggctacgtctcggggtggggcgcctactggctgggcatgaactacccgattcgcttcgtcctgttcggcggcgcgctgctggcgctctgctacggcgcgcaatccctgcttcgccagcggcagctgtttaccgtcagcaaggcgatgggcctcacgtacctgtttattgcgctgtggatcatgtcgattttcggcaattacgacgcagacaactggtaccaggtgagccaggcgcgactcctgccgtgggggctgctgtttgccgtagcggccggcgtctgcatttttatcagcctgaaaaccgatgacggaatgctgcgcggcttcggactaaccttcctggcgatcaatctctatacccgtttctttgagtttttctggaacgggatgcacaaagtgctgtttttcctgatccttgccgtctcgctggcggtgattggccgctatgccgagcgcatctggcatgcggggaacgttaagccatgaaaaattaagcgtttttaaagaagtgtggctggcggcagcgacgtcctgcgcgaattgtcgtataagcgaattttacgcttttgacaggggagcgagatgaataaggagtcgatttttcgccaactagaacaacggatcgccgggcgagcgctgacggcggaagcgctgggcgagtttaacgctatggccatcgccgatagcttgaagcaaaaacgcagcatcatcagccatcatctgaataatctccatcgcgagcagcgggtggtcaaagtgaacggtcgcccggtgctgtttttacccgttaccgttctgcgcgatcatcaccgcctggcggttcggcacggcgaatacgcctccattcaggcgctgtgcgcggatcgtcaggatagtctggcgcagctgattggcgcgcaaggcagcctgcaggaagcattgcgccagtgcaaggctgccatcagctaccctggcgcaggtctgccgctgctgctgcggggccctactggcaccgggaaaagttttctagctcgccagctctggcactacgcaatagatgaaggtattttacctgccgatgcgccttttaccgtatttaactgcgccgagtacgcgaataatccagaactactgacctcgaagttatttggtcatgcgaagggggcctttaccggcgccgataaggccgttcctggtcttatcgagaccagcaacggcggggtgttgtttatcgatgaggttcatcggctgccgcccgaaggccaggaaaagttgtttcattttatggataacggtagctggcgccggctgggggagagcgccgacgagcgcagcgccacggtgcggctaatttttgcttcaaccgaggatctggaaaaacacttcctggcgacctttattcgccgtattccggtgattgtaaaaattctgccgatcgctgaacgcggccaattcgagcggctggcgtttatccaccactttttccgccgtgaagcccagcgtttgaaccacgatctggagctggatggcgaaatcgtcagccagctaatgcgtgaaacgcttgaaggaaatgtcggtgggctggaaaatttgattcgcaatatttgcgccagcgcctggacatttggcgaacgtgatagcggtcttttacatataaaagcgggtttgctgcccgaccgattactggcggatgcgccttttacccttcagcaaaatagcgagcgggttatgatttaccgcgatggcgacgcgcagcctcttttttctggtcgtcaccatgaataccaacggctaacggaaaatatttgtagcctgtgcgaggagttggctcaggataatattagcgtgcggacctttgaaaagcttatttatcagaacgtgacgctctatcttgatgcgctgatgaatcaggagagtacggtctctctgcaggacaaacggctgcgctttattgaagatgtgggcaaagcaatcgctgtcaattatgaccttcagctaaatgtcgaattcgcttatcttaccggccgctacctcaccagcctccctctggcgccgcgcagcgttgctgagcccgtgcgtctggtgatgcagcgctggctggactcctcggcggggctggcgcaacgcatcgcggagaaactactggatgtcgtcaataataaatacgatctgctcatcgatacgcttgaccgtctggcgattaccgccattgtcagtaatgctatcgatgcgaccagcggcggaaaagtgaaagcgctgataatcgcccacggttattcgaccgccagcagcattgccggcgttgccaaccgcctgattggcgagaagatctaccaggccatggatatgccgatggaggtggcgtttaatgatgtcagtcgcgccgtggttgattatctccagcatacggacacgcgtgcgggtgtgatggtgcttattgatatgggctacaccaaggagattgccgatgcgcttttgtcggtgattaacggcccgctggtagtggtggataacgtcacgacccgcatggcgctgaacgttgccagcgagatcgcgttgggaaaaaacatcgaacaaatcgccgaagagatcgtgccgcttaatcagtcgcgttgggatgtgttctggcccgcagaaaaaaaagagcgtgtgctgctggtgacctgtattacaggtatcggtaccgcatttaaatttaaaaatctgatggagaagagcctgctcaacgattttgatattaacatcatcgcctgcgagtatacgcgcttaaaaaacagtcgtacggcggtatcgttgctccaccagtatgaagttattgcggtcgtgggtacccacgacccgcagctggccggagtgccctgggttggcattgaggaactacttggcgagcaggggcatcgacatctgagtcagctcttaagcggctatcttaatgaaaagcaaattgcgctgattaataaaaatatggttcgtgagttttcactgcataacgttgtcaactctctgacgatactgaatgctggaaaaaccatgggccatatcgaaaccattatcgctgagtggcaaaatacgcttggttttcattttaataataacttaattatcagtttatatgtgcatctcagctgtatgattgagcgtctggtaatgcgtaatgaaattagccattataaagatcttgagcaatttacccgccagcatggtgaatttattgccatggtgaatcactcgttccagcgcctgaaaatactctataacgtggcgctaccggtagcggaaattggctatattcacgatatttttgaattacgtattgaagattttagctggtaatcctcaacgcagccccggagaattacgccggggctggcaggcggttagcgaatcaatattcgactttccacatatagcggcgggtggtcagcgggtggttgcgagcggtggccagcgccaggttgtaaacatccagtacgcagttgtgcagcaggccgcagaaatattcgcgcacgctggcgtgcagtgcgttgattcccaccttttccacgtcaataatctgcagttttccctggtaacgttcgataaagcggatcgcgcgatcatccagcgggcgggtgcggccgctgctttttaataaaataaacggcgttcccgtttcggtaatctcaaaggggccgtggaaatactcgccgctgtggatgctggcggagttaatccactgcatctccaacagaatacagatggattcctgatgcgcggcgccgaatgaggggccgctgcccatcatgtagatgaccttttcggtcttccaggcttcggcaaaatggcgcgcatccgcctgaacctgctgctgagcgccgcgtaccacggattcaaaactggcaaaggcgctgaccatctcatcgtaatgggcgtatccctcagtttgcgcaagcacttccagcgccagccacaggctgtatgccgctttttgctgcgtcggatcgacggtttcgggatagcgcgcccagcagtatttaatagtgtaatcgctgtgttcgcacagcggcgtgccgggggtatataccagtccaatagtggcggcgcctttctgacgcgcgatgcgggcggcttccaccgtttcagcggtgttgccctgctgcgaggcgaggatcactacgctgtttttacctaacgcgttcggcgtcgcatggacaaattcattactggtaacatagccgacggccagctttttagcttcacaatcgagaaaatatttccccggccagaaaccggttaatgaaccaccgcagccaacaaaccatacgcgctcaatgtgctgcttagataaaatatcgcgaataatagtatgtgcgttttgatgagctatagacatattggtctccttgggatgtaacgggtcctccgctgaatagcggataacttttactatgcgtcaattaattgagttgtttacttttcattttctggtggaactgcggatccttcggtattgcgggatcgatgcccttcactggcggcagtcgggcacaaaccatttgtaacggaataatatattcaaagaccgcaaagtcgggatcgttaataaatgcgaagggcatatttttgccgttattttcgacttgtggaccaatgcgataaatatgctgagtccagccgccaagtatttccgccaggcgatcctgacgctcatcgggaaacggatcgagcatgatcagggtagagcgctcgtcgaaggcgttatagatcccgtggatgaactcctcaaattcgtaaccggcaaccggacagcgtagcgtttcaagcatctttagcgcaccttcctgaacggtgccaaacagccttgccggaccggtcaggcgaatgtccgcgctgtcgataagcggtcgggcatgattgagaacccacgcctgcgaggcctcaatgagcgtcggcaaatgattaaacgtggtatccatgcggatgagtagcgccttgcgctcctcatcgctcaggcgccgctggcgactggcgacagcaagccccagcagcatcagattaagtatggtgcagtgataccctttggttttggcgccagcccgctcttctccacagggtactgttaagaccaaatctgccgcccggtcgataacggctggcgcttccccggccatggaagcggtaagatgcccggctgcccgggcgcgttccattgcggcgagggtagagaggctgccgcctccctgagaaataccgatgaccagcgctttgtcgctgagggtcagcgccgaatcatccagcagaaaaggccagtagacatcaacgggtagcccgcaccactgctgcataaacgagcgggcggtcagcgcgccgtgataagaggtaccggagccggtcaggataatacgcgtgacgccgcgctccgttagcgcttttgccgcctgccagagatcttcccgcgtctgcgtcagcatagcgagcagacaggcgggtgtttcattcatatagtcttctacgtgcatgggtgatattcctcttcttaaagcaggcctagcgcgctggccgccatgccaaacgcgacggttcctagcaggatccagttaatattgactcccttgcggatcaacttgtacatcccaagggtgaaaagcagcggcagcagcgaaggaagtattttgtcaataaactcctgcgccttcatggtggtctgcccggcggtaaagctgagcggggtggtgatatctatcatgctggcggtcatcgcgccgacgaccatgaggccaacaattgatgcgatataggtcacccggtccataaggccgctttggtaaattctcatcagccaggtcgtacccgcccggtagccgagcttcaggccataccagcggcacaaaagatgcggcaggttataaactaacagcgccagtatcggtcccagcaggctgccctgctgggcgaaatagatacccatcccggcggcgataacctttaatgatccccagaatatggagtcgccgatgcccgccagcggtcccatcaggctggttttaatcgcgtttatcgactcctcattaaattcggggttacgctggttctcttcttccatggcaatcgacaggccgaagataaaggtcgagagatggggcgtggtgttaaacagcaccagatgacgctgcagggcgcgccccagctccgttgggtcctgatagatgcgcttcagggctggcgacattgcgaaggcatagcccatatgctgctggcgctcgtagttccaggagccctgtagcgtaaaggagcgccagaacacgctgcgtaaatcgcgggcggtgatgcggcttgcatcatcgctttgcggctgggtagcgccagtcacagtttgcgtcatttcgctcatgattagctctcctgctgcttaagattaaggaactggctgatgataaatgccaacaccacagcgaacagcgcgatggcgatgatatccagtttggtatatgccgctatcagaaatcccagaccgaggtacggcatcagtttgctgctgagcatcatgctgatcagcagggcgaagccgagcgctggcaggatcttactggcgacgatcaatccattggttatcaccggcggaatggcctccaggaaccagcttaccgccgaagaaccaagcagaatggcaaaaaataccggtagaaatccgtttaaaaaatagagtagcgtcggaccggcgaggtgcatcaggccgaccattcgggtattaccctgtgccgcatagcggtccgccagatgaccaaagcgggcgttcaccacgcgcaccaggattcccagcgtctgcgccagcattgagacagggatggcgatggtgagcgcagcctctggaccacgaccggacatgatcgaaaacgcggtggccaatacggagccggtcacgatatctggcgggtgcgcggcgccgatggcgacgttgccgaggaaaataagctccagcgtagcgccaatcagaatcccctcatgtaaattaccgcagaccagaccggtgagggcgcacatcaccagcggtcgatcgatcattgataccccaagcaggcggccatcaagtatccccagggcagcgatcagtccgagtaacgttgcggtgagcaacatagtgacctccgaagttaaagttggtcgttaaggagttcagccgagtgggcgggtacctgacgcatctccagccgaatacctttttcttttagcactctgctatgggcgatttcctcttcggtcagatagatggccttgccgaattgtcttgccccttccttctgtggcagaccgccgtaattaattgcgctaattcctgggactttttccactagcgcgagggtttccgcagtattgcccaggaccaccatgacttttttatgatccaacttgccgctgttaagcttttccgccgcctgttcaacggtggcgatgtccagcgtgacgcccgctggctttgccaggttaagcgacatcgtaatgaaggcatccgccgcggctttggcgttggcgacgatgatatggtcgatatccagcgctcgggtccaggcaaaaaccacctggccgtgcagcagccgataatcaatgcgcacgagtttaatcatgagattctccctgtgggtcagaggatggttgtgttattagaggattgatgaaaacaatggattcacgcgccgcgctggtggcgtagataatcgcggcctcggtagtggcttcttcgcacagcagaaactccagcagcagagtcagattgatgccggcgaccacgaaaacgttgcgatgtcgcatcaagacgctcacggcgctattgttgatactgccgccaagcaggtcggtgaagatcaccacttcatcaccattcgcctggacgatgagatgctccagggtttgctccagctgttcggtggtcacgatatcttcgtcataggcgcagaccgggataacgccgtgttcgtcgccaatcagcagcgacaaactgttcaccagtccgcgagcaaaatggccgtggctggccacatagatatgtttcacccggtttctccttcatccagatagcggtatctgttaagagcaaagggcgtgccagaaatgaaaagtattatttatcaattaattaaatcgtctggttcacactaaagtcgttattcctggcacaagcgggattatgagcgccagaaacttggcacaaacggcagaaaagagggggaaagagtgggtgaagaaagtcccgggcgagacgctgctgcgccatggcccgggcgttcccggcagaagggaattaaatctcggtaatggtcgtcgactgcggcagacgcgacttcggcagggtagcgttgaaatcttctgcgctatggtggccgaccgggaccaccaccaggctggtgtagccctgggctttcaggtcaaattcctcatcgaggatcgcaaaatcgaccccttcaatcggcacggcgtcgagacccatcgccgctacgcccagcaggaaattgccgacgttgagatacacctgtttcgccatccactgatcgtcatctttcagctctttgcggtgcatatcggcaaagaaagtacgacccttgtggttagcggcttttgcgtccggggtggcgaaacggccatcggcctcttcctgatccaccacgcgctgcagccaggcgtcgtccatcgcggttttcgcgcagaacaccaccacgtgcgaggcgtcgagaattttacgttcgttgaacacgtaggtgccgctggcggctttcgccacgcgagctttcccttcatcggtgctggcgacaataaagtgccacggctgggagttggtgctagacgggctgtactgcagcagcgttttcagctgttccgcttccccggcagtcagctttttcgtggcgtcaaaggccttggtggaatagcgcttcaaagcgaccgatacgatatccataactcttcctcacagtttacagcaccttaccggtgcgttcaggagaggaagagtacagcgaagatcgcaaaatgataagggtgaaaaatgcgataacacttatcgcatttggctgaaaatcagcgcggacgcaggcgctgctgggcctttttactcagcttgttcaccacctgatgccacgaatcgtcaatcagctcggccagcagatcctcgctgatatcctctcctggcaccaccgtgatccagtgtttcttgttcatatggtagccgggttcgatactgcgataaatttgctgattcagcagcgacttctgcggctcggccttgagattgaccagcgcccgcccgcgaatagtcatggtgatcataaagatgcggccgtcgaccttaaacacgtcgtactctggcccaaagggccagcagtgttcggtaaacgggtaggtcagggcgatacggtgagcgcagggatgcagtgtttccggcgtcattaggcgtccgcctcatgcagggcgtgccacatggcttcaaagccgagggcgataatctcccgggcgcgctgcggatcgtggctggcgaattcgatggtggtttccgccagcgacagaaacagggcgtcgccaaaggcgcggtacgcctcgctgaggaatatctctttcaccgacagctggcacatttcgttgagctccggaaagctctcttttacctggcggcgggtttcgtcggtgatgcgctcgctgagcgccatccggcggatcgctttgtgctccatcgggttgcgcacgccccagtcgatatagctgttccagatattgcgcgcgttctctttcgggcgcttctcgtccggatccagcccggcgatcattgtgcgcaccaggcgcagcttaatcgcgaggtacagctcgttgagcaactcatccttggtggcgaaatagcgaaacagcgttccctcggccacaccggcgctgcgggcgatggccgacgtcgaggcggctatgccggactgggcgaaagccgcggtggcagcttccagtaacgcttgctttttatcttcactctttggacgagccactacttttttcctcacgcaggtttaaacaaaccgccgatcttggcacgtctgactaggtcgctgcaacggcggaacgcaaaaattgaaaatcgtcttgacgactttcatcgctttcctaataatgagtgcgtactcactcataatcaagttatatcataaagcctccgggatgggggcttttgtctggtcaggatatgaaccgtgtcactttcagcgtggtcgccatcatgttactcgcagcagcaacgacattgccgtttgttcttaatgccggttttggtaaggcgccgcagggagcacagcttagccaggtggaagcgtctccccactaccgggacggccagttccataaccaattgcccacgccagggttcaccgggcagaaaaatatgctggcggcgtggtgggatttcctgatgaccaaacgggaaaacgcccgtcccgcgcaaccgctgccgctggtgaagaccgatctggcgacgctgcccctcgggcaggacgtgatggtctggctcggccactcctcctggtacctgcagctggcgggaaaacgcatcctgatcgacccggtgttcagcgattacgcggcgccgttctcctttatcaataaagccttccccggcgactatccgtggcgggcggaagggatgccggagatcgatctgctgatcatctcccacgatcactacgaccatctggattacgccaccattcgcgccttactgccgaaaattaagcgggtcattacgccgctgggggtcggatcgcatctgcgctactggggaatggacggggcgctgattaccgaagcggactggcagcaggcggtaccggccagcgacgagctcaccgtccacgtgctgccggcgcggcacttttccggccgcgggctgaagcgtaaccagacgctgtgggccagttttctgttcgttacccggcagcaaaagatttattacagcggcgacagcgggtatgggccgcactttaaagcgataggcgatgagttcggtccggtcgatctggcgatcatggagaacgggcagtatgaccaggactggaaatatatccacatgatgccggatgaaacggctcaggctgccgacgatctgcgcgctcgcgcggtgctgcctgggcatgcaggacgattcgttttggcgaaacacagctgggatgaaccgtatcaacggctggcggctgccagcgaaggaagggcctggcgtctgctgacgcctgtgcagggcgagccggtgtgggtcgccgataagacgcaatcatttaacgcctggtggcgctaagcgccagtgcagtatcagaggagagagcatatgacgatttccgctcaggtgattgatactatcgtcgagtggattgatgataacctgcatcaaccgctgcgtattgatgatatcgctcgccatgccgggtattcgaaatggcatctgcaacggctgtttttacagtacaaaggggagagcctggggcgctatattcgcgaaaggaagctgctgctggccgcccgcgatctgcgcgacaccgatcagcgggtctacgatatctgcctcaagtatggcttcgattcgcaacagacctttacccgcgtcttcacccggaccttcaatcagccgccgggcgcctaccgcaaagagaaccacagtcgcgcccactgaggcgcgcctctcctggtttaccgctcgagggaaaaccagcgacgccacacccagcgcagcaccagatactcaatggcgcccagcgctaagaaccacagacaaaacagcaccgtatagagctggttgagatccatcatatggaatgtctcaaccagcttttgcgccagcgtcaggcccagcgaaggcgcgggcaacagcagacaggagagcagggccagcagtaagatcccggcggcggagagcagcgtttccagtggatgtttcatgtcatgttaatcatcagttaaaaaacatattgtccggtaaaataatgcttaacgcaatatgctttgtttttttactcgctataacacgactattttaaatattatcgcctgcctttcgctctcatgttaattaatctgaaataatttgtaattaagttaattgcagccgggtgtaaattaacgtcattattatgccagcgcttttacaaaactgtaagtgctatatcccaccagcgtagcaatgataatggctagcgcgatgtacagcgccagtcggcgcccgcggtagattccaaacatattttacctcgtttagttttggtttattaatattctgtaatagttggtttgtggaattaacttatcacaaaatttttattttgcgaaaaatttagacttgtattggttcacatttttatcggcatttttgccctcttttacttcattggccaggaatgatttcaggctttccgactcacggaatttataaggaaaatgtaaattgaccaagatgaataacccaaagtttacgacgccctcgggcgacaccgcgccacggcaggtctggcagcagaccgttgacgcagtgctggcgcagaccaaaagccaggccgctgggttaagttccgcagacgccgccgagcgcctgaatacctgtgggccgaacgcgctgccggaaaagaaaggcaaaccgggctggctgcgctttctcgcccactttaacgacgtactgatttacgtgctgctggccgccgcggcgctgaccgccatcatggggcactgggtcgataccctggtgatcctcggcgtgacggtgattaacgccctgatcggtcatatccaggagagcaacgccgaaaaatcgctgcaggggatccgcaacatgctctccagcgatgcccgcgtccagcgtaacggcaagcatgagactatcccgacgcgcgacctggttccgggggatatcgttatcctgcgcgccggcgaccgcgtgccggcggatatgcgcctgattgaaacccacaacctgcgggtggaagaggcgatcctcaccggcgagtcgacggtggtggataaaatcaccgacgcgctggagggcgatctgccgctgggcgaccgggtgaacatggtcttttccgggaccaccgtcagcgccggcggcggcgtcggcgtggtgaccgccaccggcgcgcagaccgaactcggccatatcaaccagatgatggcgggtattgagaagcaccgtaccccgctgctggtgcagatggataagctcggcaaagcgattttcgccattattctcgccatgatggtggcgctgtttatcttcagcctcgcgctgcgggatatcccgatgggcgagctgctgctgtcgctgattagcctggcggtagccgcggtaccggaaggactcccggcgatcatctcgattattctgtcgctcggcgtgcagacgatggcgcgcaagcgggcgattattcgtaagctgccgaccgtggaaaccctcggcgccatgaccgtggtctgctcggataaaaccggcaccctgacgatgaacgaaatgaccgtcaaagcgatcatcaccgccgactgctgctatcgggtggaaggcgacagctacgagccgcaggggcggatcttcctcgaggggagcgatgagcccgtgcaggttcagcccggcaccgtgctggagacctggctgcgcaccatcgacctgtgtaacgacagccagcttacccaggatgagcgcggtctgtgggggatcaccggcgggccgaccgaaggggcgcttaaagtgctggcggcgaaagcgcagctcccggcggtggaggcccgtctggtggccaagatcccctttgactcgcagtacaaatatatgtcgaccctgcagcacatcgatggcaatgcccgggtgctgatcaccggtgcgccggacgttatcttcgccatgtgccgcgagcagatgagccgccacggcgcggtgccgttcgaggcgcagtactgggaagaggagatggcgcgcttcgcccgtcagggactgcggatggtggcggcggcctgtaagccggccagccttgatgccaccaccctcaaccatgaggacctgcaggagggactgattttcctcggcatcgccgggatgatggatcccccgcgtccggaagccattgacgccatccacgcctgccagaccgccggcatacgcgtgaaaatgatcaccggcgaccacccgcagacggcgatgagcatcggccagatgctggggatcaccaacagcagccaggccatgaccggctaccagctggagcacatggacgatgcggcgctggcgaaggcggcggtggagtacgacatctttgcccgtaccagcccggagcataagctgcgcctggttaaagccctgcaggataacggcgaagtggtcggcatgaccggcgacggcgttaacgacgcgccggcgctgcgccaggccgacgtgggtatcgccatgggtatcaaaggcaccgaagtcaccaaagaggcggccgacatggtgttgaccgatgataacttcgcgaccatcgccagctcggtaaaagagggccgtcgggtctatgacaacctgaagaagaccatcctcttcatcatgccgaccaacctggcgcaggggctgctgatcatcatcgccctgctggcggggaacattattccgctgaccccggtgctgatcctgtggatgaacatggcgacgtcggcgacgctctccttcggcctggcctttgaggccgcagagcgcaacgtgatgaaccgtccgccgcgtaaaaccggccagcatgtgatggatggtttcgccgtgtggcgagtggctttcgtcgggtcgatgatcgcgattgccgcctttatccttgaggcctggctggcgccgcgcggccacagtccggagtttatccgcaccgtgctgctgcagatgctggtgacggcgcagtgggtctacatgatcaactgccgcagcagcgacagtttctccctgagcatgggtctgctgcgcaacaaaggcatctggctggtgaccggcgtcctgctgctgatgcagctggtcattatctatgtcccgctgatgcaaagcatgtttggtacggaagcgctgccgctgcgctactggtttgtcactctggtcatcggcgtcgccatgttcctggtggtggaaatcgagaagcgtctgacgcgccggttccgcaaaacggcctgaacaatctcgcgcgcctcgctgcaggcgcgcgttactgtcgcaaggatcctctatgattaaaaccttccgctttgctctgctggcctgcggtctggtcggcggcgccctgacggcgaccgccgcgccggcggtgccggtccgcgtcgccacggttgaactggctcctcatgctgaagaacgcgctatccccgggcgggtcgaggcgatccgcgccgtcgacattcgcgcgcgcaccgaaggggtgattgttcagcgccacttccaggacgggcagtatgttaccgaaggcgacctgctgtttaccctcgacgacgcgcagccccgcgcggcgctggctctggcgcaggccgagctgaaaagcgccgaagcctcattacgtcagtcgcagcagttgctcactcgctacgagcggcttatcaacaatcactccatcagccgcaacgacgtcgatacggcccggatgcagcgcgacgtcgccgccgctgccgtacagcaggccaaagcccgcgtcgaggcccagcagattgtgctcagctacacccggattgcggcgccggtgaccggtcgcgtgggccatagcgcctttcacgtcgggacgctggtcaattcgtccagcggcgtgctggtggacattgtgcagttggatccggtgcgggtctcgttcgccctcgacgaagccgcgtttttcagcaaaaccggccagcacgccgatatccacgctctgaagcaggcgtggctggcgcagattgaggttgatggtaaacggcgcgacggggtgttgacctctatcgataaccggatcgacgcccgcaccggcagcgtagcggtgcgggccgagtttgccaatccgcagcaccgtctgctgccgggcggcagcgtgacgatcctgttccgtccgcaggaactgccgtcgcgagtgatggtcccggccgccgccgtgcagcaggatccgcagggctttttcagctgggtgctgaagccggaccacaccgccgggcagcgtcgtctgaccctcgcggggcagcaggggcagcagtttgcggtcgagaaagggctgcaggcgggcgagcaggtgatcaccgacggcgcgcagcggttgcgcgaaggcgctgcggtgcaggtgctgaactagctaaggagaagggatgctgaccttttttatccgtcgtccgcgatttgccatggtgatcgcgctgctgctgacctttgtcggcgcggtgtcgctgaagctgatcccggtggagcagtacccggcgatcacccccccggtggtgaacgtcagcgccagctggccgggcgccagcgcgtcagacgtggcggaagccatcgccgccccgctggagacccagctcaacggcgtcgatcatatgctgtatatggagtccaccagctcggatgaggggacgtaccgcctgagcataaccttcgcggcgggcaccgatgccgacctggcggcgatcgacgtgcaaaaccgggtggcgcaggcgctggcgcagctcccggcggaggtgcagcagaatggcgtccaggtgcgcaagcgcgccagcaatctgcttatgggggtaagcctctactcgccgctgggcacgctgtcgccgctgtttgtcagcaactacgccagcacccaggtgcgcgaggcgctggcccgcctgcccggcgtcggcgaggtgcagatgtttggcgcccgggattacagtatgcgcatctggctgcgcccggaccgcatgaacgcgctcaacatcaccacggatgatgtcgcccaggcgctgcgcgagcagaatgtgcagggcgcggcggggcaggtgggcaccccgccggtatttaacggccagcagcagacgctgaccatcaacgggctggggcgtctgaacgaggcggccagctttggcgagattattatccgccgcggcgcgcaggggcagctggtgcgcctcgccgacgtagcgaccattgagctgggcgcccgcagctacagctccggcgcccagctgaacggtaaagcgtcggcctatctggggatctatccgacgcccaccgccaacgccctgcaggtcgccagcgcagtgcgtgcggagcttaaccgcctgcacactcgctttccggcggatctcacctgggaggtgaagttcgataccacccgctttgtggcggcgacgatcaaagagatcggcgtctcgctggcgctgaccctgctggcggtggtcgtggtggtgtcgctatttttgcagagctggcgggcgacgctgatcgtagtgctggcgatcccggtgtcactgatcggcacctttgcggtgctctatctgctgggctacagcgccaacaccctcagcctgttcgcgatcattctcgccctgacgatggtggtggatgacgccattgtggtggtggagaatgtggaaaccaaaatggcggaagggctggatcgcctgcaggccaccgcccaggcgctgcggcagatcgccgggccggtgatcgccacgaccctggtgctgctggcggtgtttgtgccggtggcgctgctcccggggatcgtcggcgagctgtaccggcagtttgccgtgacgctctccaccgcggtggccctgtcgagcctggtggcgctaaccctgacgccggccctctgcgcgctgctgctgcgcccgcgtcctgcccggccggcggcggtgtggcgggcgtttaaccgtcttctcgacggcacccgcgacggctatggccggctggtaggctggatgaaccgccgtccctggctggcgctggcggcgacggtggcggcaggcgcgctggtggcgttcagcttcacctcgatgccgaaaggcttcctgccgcaggaagatcagggttacctgtttgccagcgtgcagctgccggaggcggcgtcgctggagcgtaccgaagcggtgatggcccaggcgcgtaaactgctgatggctaacccggcggtggaggatgtgattcaggtgtccgggttcaacattctcaacggcaccagcgcctctaacggcgggtttatctcggtaatgctcaaggactggcatcagcggccgccgctggatgcggtgatggcggatattcagcgccagctgctgtcgctaccggaggcgacgatcatgaccttcgcgccgccgaccctgccgggcctgggcaatgcctcggggtttgatctgcgcatcctggcgcaggccggtcagtcgtcggcggagctggagcaggtgacgcgggagatcctccagctggcgaaccagtatccgcagctgagccgggtgtttaccacctggagcagcaacgtgccgcagctgaccctgacggtccaccgcgaccgggcggcgctgctggatgtgccggtggcgcagatcttcagcagcctgcagacggcgttcggcggcacgcgcgccggcgatttcagccgtaacaatcgtgtctatcatgtggtgatgcaaaatgagatgcagtggcgcgagcgggcagagcagattagcgagctgtacgtccgcagccgcgacggcgagcgggtgcggctgagcaatctggtcaccattacgccgacggtgggggcgccgtttattcagcagtacaatcagttcccgtccgtgtcggtgagcggttcagcggccgagggggtcagcagccgcacggcgatggcggccatggagcagattttgcaggcccatctgccgccgggatatgactatgcctggagcgggatctcctggcaggagcagcagaccggcaatcaggcggtgtggatcgtgctggcggcggtggcgatggcgtggctgttcctggtggcgcagtatgagagctggacgctgccggcgagcgtcatgctctcggtgctgttcgccatcggcggagcgctgctctggctgtggaccgcgggctatgccaacgatgtgtatgttcagatagggctggtgctgctgatcgccctggcggcgaagaatgcgattctgatcgttgagttcgcccgcagccggcgcgaggaggggctgtcgatagtcgacgctgcgcgcgagggggctacccgccgcttccgcgcggtaatgatgaccgcggtgtcgtttattatcggcattatgccgatgatgctcgccaccggcgccggggcgcagagccggcggatcatcggcaccacggtattcagcgggatgctggtggcgacgatggttggcatcctgtttatcccgtcgctgtatgtactgtttcagcgtatgcgcgagtgggcgcatcggcgggggtaagcgcggcgctaccggtcggtaacggggatactccaggctgcaacgactaccgggcggtcccctctccctttggaagaggggtagggtgagggtgggttttgcgttcacgttgcgtttgggcgtgagccccgccttatctgccgacctccggttcgccgatttcagcgggaatcagccctgctgcacgcccgtagatttcaggagccacaccatagcgaacagactctgtaggcccggtaagcgcagcgccaccgggcaaggacatcgggcacggcggcaataccttgcccggcctgtcgttaatttattcactctcgtggctggaatggccgcccccaaacgcgcccgctattttctctccaccgttatcatggtcacgaacggatgatactgccacggcacgctgccgcctttgcggtacatcttcgacagggtgccgtcgagataaagcatctgccgcacgccaagctttgactgcgcatagcaggcaaaatcgtaaaagttggtctcgcgatcgctgagcataaacaccacccggccctgcttatcgataccaaccccgttgcgcagcttgcgcgaactggcggagggcttcagtcgccagttgatgacgccattttcaatcagcatcgggccggcctgcaccgcatagcggatggcgggagagggtttgtacgccggcagcggcacgattttcgcccggccgttttccaccaggaatacgccgccggggcggataaagaagttcccgccgccggcggagcggttgaccggcgtcagccgtttgccgtcttcgatatacagccccagcggcgcgtaggccttatcgtaaatgccgccgttcatcgccatctgcacccggccgtcgccatcgatacccgccagcagcgaacgcagggaaccccaggctttgccgtgccgatcctgccagtacatcgcaatgcgctctttctgcgcatccacccgatagctctgcagggtcagcgtcgggtcggtgagggtacaggcggcgctggcgacggcggccaggggcagcagcgccagagggagcaggcaacgtaataacatgggcagtcctttctatagtctgcgccgagtatacccgcctcgctgccttatgccgcccaaatctcacagtgtttttgcaccagcccggaaagcgaaccgccgttggcgataaagtcgcgcatctgctgcgcctcgctgtgcggcgatttcgcctggcgaaccaccgcctccagcgctgccgtcgccttcagctgatgggcgaaaggggccagccggtcggcgagctgcaggatctcctggcggatgctgcgctgctccccgctgcgcacgtcggtgagggtcccgtccagcccgtagcggcaggcctgatagcggttaaaggggtacagcagataatcatcaggctggtgcttaaaaggacgctccgtcaacagccagcaggccagggtctgaataaagccggcgatgtggatcgcctgggcaagggtcaagggggtgtccatcacccgcacctcgacggtaccaaactgcgggctgggacgaatatcccagtgcagatccttcatgctgtcgatcatgctggtgtagctcagctggcggaacaggcgacgaaacccctgccagtcggccacccacggcatcggaccgttgtcgggataggaggagaagcggttcaggcgtgaacaggcgaagcggctgtcggtgctgtcaaaccacggcgaggcggcgttaagggcgatgaagtgcggtacaaagcgcgacaggccatgcagcagatagatggcgtcgtcgccgctctggcagccgacgtgcacatgctggccaaagaccgtcgcctgctgcgccagatagccaaaatgctcgacggttttgacatagcgcgggttatcgctgatttgctggcgctgccaggcatgaaaggggtgggaacccccgccgcagatctgcagatgatggcgcagcgccgcgcgctggaccgcctgctggatggcgctgagctggatttgcgcatggctgatgtcgcggcacaccccggtggcgatctccagcatgctctcggtgatgtcgtgtttggcttctcccacggtcagctcatgctggacgtcggcaatcagcgtcgaggcatcctggctgagatcgtaacccggcgggttcaccacctgcagctccagttcgataccgagggtaaaaggatcggagcggtgaaaatcggctaaaggcatagtctctcccggtcgatgtgttccctgaagtatagaagggattgatcccgacggagaatacgcggcggcggtggacgggggatgaataaaaagtgacgcagagtgattatttgaaatttgccatatagcggctggtgcaattctgcaacatatttcccgctggcggtgcggcggaataaggcgcaattattttcccataattatcatggtgataatataagtcattcttattttaccggtcggttttgacctattttcgtccgcgtaagagctggtacgcattttgcctgttaatccgtgacattttatttaacagggatcatgtgatgcacaaaaagacgttattttcgcgtgccggtcgtctcgccgtggcggtgagcggcgcactggccctggcgggcgccgccttacctgccaacgcctccacgctgcggatcgccatgaccgccgcggatattccattaacccttggccagccggatcaaggctatgagggcaaccgctttaccggcatcccgctgtacgacgcgctggtggagtgggatctgtcgcaaggtgaaaagcccagcggtctggtgccggggctggcgaccgagtggcacatcgatccgcagaataccagccgctggattttcaccctgcgtccgggggtgaagtttcatgatgggacggaggtgaacgccgacgccatcgtctggaacgtggataaggtactgaataaagcggcgccgcagtacgccccgggtcagatcggcaacaccctgtcgcgcatgccgaccctcaccggcgcagagaaaattgacgaccacaccgtggcgctgaccacctcggaaccggatgcgctgctgccgtacaacatcaccaacctgtttatcgtctcgccgacggcgtggcagaagcagtatgacgcggtgccggccagcgtgggagatagcgccgcgcgcagcaaacaggcgtggaccgccttcgccgcccacgcggtgggtagcggcccgttcaaactggagaagctggtgccgcgtcagcagctgatcctcgataaaaaccccgactactggaacaaagatcgcattccccgggtggataaagtggtgctgatccccttgccggaggccaacgcccgtaccgcggcgctgttgtcgaagcaggtggactggattgaagccccggcgccggacgccatcgatcagatcaagtctcagggttttcacctctacgccaacacccagccgcatctgtggccctggcagttctcctttgaaaaaggatcgccgtggcaggacatccgcgtgcgcaaagcggccaacttgtgtctgaaccgtgctgagctgaagagctacctcggcggctatatgaccgaggccactggggtctacgaggctgacagcccgtggcatggcaaacccaccttccagatcaaatatgacccggacgtcgcccgccagctaatgaccgaggccggatacagtgccagcaaaccgctgcacgtcacggtggctacctcggcctccggctccgggcagatgcagcccttgccgatgaacgagtatatccagcagagcctgaagagctgcttcttcaatgtggatatcaaagtggtggaatggaacaccctgtttaccaactggcgcctgggcgcccgggacccctcggcgaaagggatcgatgcgatcaacgtcagcgccgcggttaacgatccttactttggcctgatccgcttctcgacggccaaagcgtttccgccggtggcgaccaactggggttacttttccacgccggagacggagaagctggccgccgccgtcaagcacgcctttaccccggcggagatgaacaaagcggccggtgagttgcacgccgcgctggtggatcaggtgccattcctgtttgtcgcccacgacgtcgggccgcgtgcgatttcccctgcggtgaccggggtggtgcaaccgcagagctggtttatcgacctcagcctggtgagcaaaaaagagtaatcgcgaaaggggcgaccgatgatcaatacgctgctataccgcattctgctggctatccccaccatgctgggggtggcggtgatctgtttcatgctggtgcagatcgccccgggcgacccgctggtgtcggtgatgccgccggacgcctcggaggcgctgcgtcagacattaatgcaggcttacggctttgataagccgctgcccctgcagtttatccactggctgtggcgggcgctgcacggcgaccttggtatgtcggtcgccaccggccgcccggtgatagacgaagtgatgaccgcggtggcttactctctgcgcctggcgctgctggcgacggcgatcggttttgtcctcggcagcctgttcggctttgtcgctggctattttcgcaacagcgtcattgaccgtctggcctcggtattgtcggtgtttggcgtcagcgtgccgcactactggctggggatgctgctggtgatcctctgcagcgtcaagttcgcgctgctgccggccaccggcggcgggccgataggcgaggtgggctggcaatgggactgggcgcacctgcagttcatgctgctgccggccctcaccctgtcggtgatcccgaccgggattatcgcccgcaccgtgcgctcgcaggtggccgatatcctcagccaggagtttatcgttggcctgcgcgcccgcgggctcaacgagtcgcgcatctttgtccatgtcatgaaaaatgccgcgcccaccgcgctggcggtgatggggctgcaggtgggctatctgatgggcggctcgatccttgtggagaccgttttctcctggccgggaaccggattgctgctcaataccgccatttttcagcgcgacctgcccctgctgcagggcaccatctgggtgctggcgctgtttttcgtgctgctcaacctgctggtggatattctgcagaccaccctcgatccgcgtattaagaggagctgaccatggtggatacggcaacgacgaaagcggtcccggccgcagcggcccacgctacccggcaaggttactggcgcggcgtgctgcgccgcctactgcgcgaccccggcggggtggtggtgggcgtggtgatcctcctgctgctggccctggcgctgttcggtccgtggcttatcgtcaaagatccctatcaaacgtcgatgttcctgcgcctgaaacccatcggcagcgatggcttcccgctgggctcggatgagctgggacgcgacatgctgtcgcggctgatccttggcacccgactgtcgctgtttatgggaattgtcccggtggtgttcgccttttttatcggcggggccatcgggattatcgccggctatacgggcggcaaaaccaataccgtgattatgcgcaccgtggatgtgttctatgcctttccctccgtcctgctggcgattgcgctgtcgggagcgttgggggcgggcatcggcaatgcgctgttgtcgctgaccctcgtgtttgtcccgcaggtggcgcggattgccgagagcgtgaccgcccaggtgcggcatatggactatatcgacgccgcccgggccactggcgccagcgcgttgaccattatccgcgtccaggtgttgggcaacgtgctcgggccgatcttcgtcttctccaccgggctgatttcggtgtgcatgatcctcgcctccggcctgtcgtttctcggcctcggcgtgcggccgccggagcccgagtgggggctgatgctcaatacgctgcgcacggcaatctatacccagccgtgggtggccgccctgccgggcctgatgatttttatcacctccatttcgttcaatatcctcgcggaccgcctgcgtgcggcaatggcgattaaggagtaagcgatgcaaccctttatcaatatcgaccttggcgggccggcgcagccgcagctgaaggtcaatcacctgctgaagtactttcgcggcggcaaaggccgggaggtggtgcaggcggtggacgatatcagcttcacggtgatgaaaggcgaaaccctgggggtggtcggcgagtcgggctgcggcaaatcgaccaccgcccggctgctgatgcagttgctcacccaggacagcggcgaactgatcttcgacggacagggggtcggctcgtcacgtctgccgctgaaagcctaccgtcgccaggtgcagatggtcttccaggatagctatgcttcgctcaatccgcgcctgaccatggaggagagcatcgccttcggccagcgcgtccacggcgtcagcgccagagaggccagcgaatatgcccgctatctgctggcgcacgttggccttgagccggcgcgctttgccgaccgctacccgcatgcgctctccggcggccagcggcagcgggtgaatatcgcccgcgcgctggcgatgaagccgcggctggtgatcctcgatgaggcagtgtcggcgctggataaatcggtggaagcccaggtgctgcagctgctgcaggagctaaaacggactcttgagctgacctacgtgttcatcagccacgatctgcacgtggttcgctggctgtcggatcggatcctcgtcatgtaccttggcgaagtggtggagattggcccggcggagcagctgtttaccgcctccgcccacccctatacccgggcgctgttaagctcgatgccctccatggacccggaaaaccgcaccctgacctcgccgctaagcggcgatccccccagccccatagcgccgccgagcggctgccgctttcacacccgctgcccgcatgcgaaggcggtctgcgccgaagtgaaaccgcagctggaggcggtcggggaggggcaccagagcgcctgcctgatggcgcagccggcctcgccctggcatcaaagcatcccccttaaggaggtcagccatgtcggataacgcctttgtccatgtgcgcgacctgcgggtcgtctttcgccgcgacggacagaccatcaacgcggtcaacggggtctcctttgaggtacaaaagggggaggtgatggcgctgattggcgagtcgggttccggcaagagcgtgaccctgcgggcgctgatgcgcctgcacccgccagggagcagtgagctctccggcaccctgcaggtgggggacgacgaggtgctgacgatgagcgccagccagctgcggcgctatcgcggcggacgctgcgcgatgatttttcaggagccgctgctggccttcgatccggtctacaccgtcgggcagcagattattgaagggttgcgccgccacgaagggctgtcgcgccaggcggcccgggacagggcgctggaggccctgcgccaggtgcgcattcccagccccgagcggcggctggatgcttacccgcacgagatgtccggcggaatgcgccagcgggcgatgatcgcccttgcgctctcctgtaacccgcagctgctgctggcggatgagccgaccaccgccctcgacgccacggtgcaaatccagatcctgatcctgctgcgcgagcagcaaaagcagcgcgggctgtcgatcgtgtttgtgacccacgatatcggcgccgcggtggagatcgccgaccgggtggcggtgatgtacgccgggcggatcgtcgaggaagcgtcgatgagcgagatcctgcgccacccgcgccatccttatacccaggtgctgctgggcagtcggccgaaagaggggcttaagaaaggtgatgccctgcactgcattcccggcgcgccgccggatctggcgcgcttgccgcccggctgcgcctttgccgagcgctgcccgcaccgtcgcccggtctgtgagcagagtctgccgccgacggaatccgtcgcggagcgccacgcggtgagttgccaccgctggcgcgagctggcgattgacgctaacgcccaggccctggccgtctgatcggcggcaaaaaaccatacaggatgaagaccaggcgttgatagcgcattcccaccgccggttacgctggcggcgaccttgatgtcaggagactaccatgagcagtgatgtactttttacccccgcgaccgacaccaccggctggcgcatcaatggcgaccgcctgtgggcgtcgttaatggatctcgcgcagatcggcgccacgccgaagggcggctgccgccgtctgaccctcaccgacctcgaccgccaggggcgggacaaggtaataggctgggcgcgggaggccgggatgagcgtcaccatcgataaaatcggcaatgtgtttatgcgccgggaaggccgcaaccccggcctgccgcccatcgtctccggcagccatattgacacccagcccaccggcggcaaatttgacggcaactacggcgtgctggcggcgctggaggtggtgcgcacgctcaacgatctgcagattgacaccgacgcgccgattgaggtggtgttctggaccaacgaagaggggtcgcgctttgtaccggtgatgatgggctccggggtctttgccggcgtcttcccgctggaagagacctgggccgtcacggataaagagggtgtcagcgtcggcgaggcgctggcgcagatcggctatatcggcgagcagaccccgggggaccatcccatcggcgcctattttgaggcgcacattgagcaggggccgattctcgaagatgaagcgaaaaccatcggtatcgtgcagggcgtgctggggatccgctggtacgactgcgtggtcaccggccaggcctcgcacgccggacccacgccgatgcgcctgcgtcaggatgccctgcaggtggcgacccgcattatgcaggaagtggtggccattgccgggcgcagcgaagagggacgcggcaccgtcggcagcgtgcaggtgtggcccaacagccgcaacgtggtgccaggggaggtcaccttctccattgatatgcgcaatctcagcgatgcgctggtggacgagatggatcgccagctgcgggcgtttatagcggaggttgagcgggagagcggtctgcaggtggccctgaagcaggtaagccactatccggcggcgccgttcgatgctgaatgccagcaggccattgccgatgccgcgcagcggctgggctatccggcgcggccgatcgtctccggcgccgggcatgacgcagtgtatatgagctacctggcgcccaccgggatgatttttatcccctgcaaggacgggatcagccataacgaaattgagtatgcctcgccggagcacgtcgccgccggggccaacgtgctgctgcaggtgatgcttcagtacgcgcggccggtgtagacggtcgtcctccccggcggcgcgtcctccagccgtttatcatgctgtcacccgggtaaggcggttacgccgccgcgacccgggacggcggatgacggggcggtcaatcacggctcccgctccctgcgacaacccgctgacggccaaatttgcgcgagcccaccacgcacagcaccacgcccagcgtgaccgccagcatcaaggggctgacggtttcgtgcaacagcgccgccgacaggccaagcccgaagaacggctgcaatagctggagctggccgacggcggcgatcccgcccgcggccagccctttgtaccagaagatgaagccgatcagcatgctgaacagcgacacatagccgagcgcgacccaggaggaggccgagatggcatgccaggaggcgggctgaaccagcagcgaggcggggagcatcaacggcagggcaatcaccagcgcccagcagatcacctgccagccgccgagctcccgcgtcagcttcgccccttccgcatagccgaggccgcagacgataaccgccgccagcatcagcagatcgccgctgagtgaggccgccgcattttgcgtcagggcgaatcccaccaccagcaggctgcccagcagcgaaaagatccagaaagcccgccgcgggcgttcgccgccgcgcagtacgccaaagagggcggtcatcagcggcagcaggccaataaacacaatcgaatgcgccgaggtgatgcgctgcagggccagcgccgtgagtagcggaaagccgagcaccaccccggatgagacgatgatcagggacacaagctgcgccaggcgcgggcgtttctggcgaaagcccaccagcagcgcgatggcaagcagcccggcgatagaggcgcgcagaaaggtcaataacaacggatccatatcctgcaccgccagccgcgtcgcgggcagcgaaccgctgaaaatgatcacccccagtaaaccatgaagccatccggaccaggggccgggcgccgatttatccagtgttgaatctaccacgttaacctcgcgttatctgattgggcttcgcccgcttgagcatcgtcagcggcgatggtaatgtgcccaatctaatacaatcaaattattgtcatagatacatttcgcgatgaaagcccgatataaagccgttgtcgatcgatatgcgcaggcgatccgcagcgggcagctgcccgcaggcagccgtctgccgacgcaccgtacccttgccgccggggagcgcatctcgctggccaccgccacgcgcgtctaccgtgaactggaagagatggggctggtcagcggcgaaaccggccgcggcaccttcgtgcgcgacctctcgctgccgccggggcacggggtcgatcagcaggtggtcgccgccgatgtcgtggatctcaatttcaactacccttcgctgccggagcagggcgatgcgctgcgcgaggcgctcaggcagctggcgatggcgggcgatattgactcgcatctgcgctatcagcctcacgccgggcggcttgccgagcgggacattatcgcccgccatttgacctgccagcactttgcgccggacgcggaaaatgtcctgatcgtcaacggcgcacagcacgggctggcggtgaccgtcatggggctgttacgtccgggggatgtggtggcggtggatgcgctgacctattcgggcttcaaggctctggcggcgctgtatcatctggagctggcggcgatcccctgtcgaccggagggaccggacctgcaggcgcttcataccctgtgccagcagcggcgggtgcgggcggtgtataccatgccgacgctgcacaatccgctgggctgggtgctcaacaccggtcagcggcaggcgctggccgatctcgcgcgccagcacgacctgctgattattgaagatgccgcctacgcccggctggtgagccatccgccgccgccggtggtcagctatgcgccggaaagaacggtgtatgtcaccggattttcaaaaaatatcgccaccggactgcgcgtgggcgtggtgatttctccgccgcgctatcgcccggagattgagcgcgccatccgggccacgacgtggaatacgccgacgctgataagttcgctgatctgcgcctggattgaagatggcacggtggcgcgctttgaaacgcagaaacgccaggatgcgcgacagcgacagcaggtggcccgcgaggtgctttgtgggcttcccgtcgtcagtcatcccgattcgtacttcgtctggctgccgctgggtgaagagagccgggccgatcggctggcgaatgcgctgatggaacgccgcatttcggtatcgaccgccgagccgttctgcgtctccgccacgatcccgcaggcgctgcgcattgcgctcggatcggtgcctttcgacagcctgcgcccggcgctgctcagcgtgcgcgacgccgttgagtatgaacaataccgctaacccatctgctccagctggccgcgcaggacctccaccccctgggcgatggcgtcggggttaatggcgtggaatcccatgcgaaaatagttatccggcggcgcggcgctgagaaaatggcgcgccccgggctcaatcagcacgccggcgtgggcggcgcgccaggtgagctgctgggtgttgatctgcgccggggtctgcagccagaaggcgttagcatgttcgctccccgccagcgcgcgacacgacggcagatagcgctgcagggcggcgtgcagacgctcccagcgctgggcggagtcaaagtggtagcgccgcagatgggtttcataatggccctgggcaaggaagtgggccatctggtactgaatgttggtcggcggatggcgatagaccagccggcgcagggcgcgcgcctcgtcgatcaggtccgggtcggcgaccataaaccccaaccgcaaccccggtgacagcgcttttgacaggctgctgacatacaccacccggccgctgcgatcgctggccttcagcgccggcagcgggttgagggtaaagttactctccgagtcataatcatcttcaataatgaccgcgtcatggcgggcggcatgctccagcagctggcgacgccgcgcactgctcatggtcaccccggtgggcacctgatggcctggagtgacatagtagtaatcgcagggacgctcattaagcacgatcccctcttcatccaccgggtgcggcaccacctcggcgtcggcgagcagaaaggtgttgatggcttcgcggaagcaggggttttcgacgccaatgcgggtggtggaagagagcagcagtcgggtcagcaggtagagggcattttgcgagccaagggtgatgagaatttcatccggcgcggcgacaatgccgcgcttgggcagcacccgggtgcggatctgctcgatcagcatcggcacatcctggtcaatatggtcgatgacccaggccgggtcgcgcaccccgccgtgcagccagttcgccgccgagcgccaggtggccagcgggaattgccgggtatcgggctggccgtagataaacgggtagcggtagtgcatccagcccgccggtttgaggatcgactcctgctggctgggggtcatctgcagccggtcgccccagcgtggtgcagcggcttcgcgctgcggtgcactctcgacggcggcaggcgaagcttcatgatagtcgggatgcaggtagtaaccgctgcgtgggcggctaatcaggtagccctcgttgaccagactttcaaacaccagcgcggtggtgttgcgcgagacgcgaagctggctggccaactggcgacaggagggcagcggggtgtcggcggcgaagatcccgctgagaatggcattcaccagcgtctctcgcacctgttcctgcaaaccgcggccaggctgaaaatcaacgtgtaacaggtgacggatcatacggggctcctctggcaataacgcattgcgaccacccgttacactcagcaaattccataccaccctgccgccatctgacacagcgatgcggttcatctggctctatacggaattgaaaaacgctcccacattaaaaacgtattcagccgccgtggactggaacgtccccggccactattttgcagaaaccttttcgcgttctggaatgaacccgtctggccaatccatcaggggtgaaataatgaaaaaatcattggcatcaatgtgtctgagcgctgtattaacggtcgctttttcttatcacgccgtcgcggccgatcttccggaaatagaaaaatccggcaccttgaaagtggcgacggaagatgattatgcgccgtttaactttatgaataatggccaggctgatggctttaacaaagatatgcttgaggaattacgtaagtacgcaaaattccatgtcgaccagagcatattaccgtggaccggattattagcggctgtctccaccgggcaatacgatatggccttaaccggggcggttattaccgatgagcggctgaaggtctttgatttcaccccaccgtgggcctccgcgcagcactatttcgtcaaacgcgctggcgatacctcgctaaataccattgccgatctcagcggcaaaaaagtgggggtacaggccgggagcgcgctgctggcgcgtttgccggagctgaaggcgatgctggagaagaccggcggcaagctggggccggtggtggagtatccctcctatccggaagcctacgccgacctggcgaacaagcgactggattacgtgattaacgtggtgatctcggtaaacgacctggcgaaagccaaaccgaaggtcttcgccaaagggctggccgtctccggaccggggtatatggcgtggccgatcccgaaaaactcgccgcagctgctggcctatatgaccaggtttatgaaccacatgaaggagaccggcaagctcgccgaactgcagaaaaaatggttcggcgaaacctatgacaacctgccgaccgaggcgatcaccagcccggaacagtttcacaaactcgccggactgtaatattccgcggcgggcgaccgccgcctgttgctgagaaggagggcctcatggatgcaatttcctggcagttattaatcgaaggcgcatggacgaccctctggatttcggccatcgctatcgccttcggggtggtggctggcctgctgatcgccctggtacggatgctgcgcctgccggtgatcgaccagctgctggtggtctatatcagtctggcccgcgcgacgccgctggtgacgctggtgctatttctgttcctttccctgcccacgatgggcattaacctcgacaagaacgtggccgccatcgtggcgctgacgcttaacacgtcggcgtttaacgctgagatctggcgcaatgccttccgcacctttccgcgcgaacagcgggaggcggcggagtcggtagggatgcgccgctggacctacttccgctacatcatgctgccgcagatgtggatcgagagcctgccggcgctggtcaatgagatgtcctttttgatcaaaggtagcccggcgatcgccgtgattggcgtggtggatctcacccgggtcaccaaccgtatctcctcggtcacctacgagccgctgtcgccgatcctcgccgccggcctgctgtatgtggcgatcatcggctgtttgttgaagctgcagggtatcgcggaacgtaaagccaggcgtctggcgcgctaggaacgggaggcattatgaatcagtggggcgttatctggtcggttcgcgatagctttattgccgggttattcgcgaccctcgaactgtttattaccgccgccctggcggcgctgattatcggtattgcgctgtgttattttagcgaatatcaaaagaaagtgattaaccggattattattggtttcgtcagcctgatgcgcgcgatcccttttttgatcctcgcttatcttctgtattacggactgccgcagctcggtattagcatggagccgtggaccgccggtttactggccctgattatttatcatggcgcctatttctttgaaatattgcgcagccagcggcgggtattttccggcggatatattgaagcggcaattgctcagggcttttctcgctatgccatttttcggcggattattttacccaatatcgtctcttccgccttaccgctgatcggcaatcagctgattatttgcctgaaggacaccgctttcctgagcattattaccgttcaggagatcaccgccgccgccaacagcgtccaggcgacctattttattccgtttaacgcctttatcgtcgccattgggctttactgggcgatcagcattctactggagctgctgattaagcgcctgaccgcctggggagccaaaagaggaatgagccatgcctgagtctattgccgtaagcgtcaaaaacgtctccaaacagttcgataatgtggaagtcctgcgggatattaacctgacggtggagaaggggaccgtggtgagtattctcggctcgtccgggtcgggaaaatccaccctgctgcgctgtatgaactggctggaacagccggaccgcggtgaaattcatatcggcggtcagcggctggggattgatgaacagcgcggccgggcgatgtcgcaccgccagctggccaaaatccgcgagcgggtggggatggtctttcagagttttaacctgtggccgcatctgaccgtgcagcagaacgtcagcgaggcgctgctgcgcgttaagggcatgaaacgagacgaggcgaaggccatggccatgcagcagctggagaaagtgggcatggcgcacaaagccgatgtttacccgatcactctctccggcgggcagaagcagcgggtggcgatcgctcgttcgctggcgatgtcgccggaagttattctcttcgatgaaccgacgtcggcgctggatccggagctggttaatgaggtgttgggggtaatgaaagcccttgccgccgagggctacaccatggtggtggtgacccacgagatggattttgcccgccaggtgtccaatgaggtggtgtttctggagaagggactgctgattgagaaggcgccgccggagaagttcttcactcagcctgactccgaacgcgtcaggcagtttctgcaaagcagccgttagtccggcctgcattccctgccggcagcgccgacaggggatgcgtcgggtttcgcttaatcccggtcgatagcgaacggctgccacgcctgacgcaccggcatcacctccacccggttaatgttcatatgcgccggcagcgtggcgatataaaacatctgctcggcgatatcgcgcgcgctcagcggcgtggtgccgcgatagagcttatccgatgccgcctggtcgcctttggttcgcaccagggtaaattcggtctcggcaatccccggcgccagatcggtgacccgcacgccggtgccaagcagatcgcagcgcaggttatagctgaactgcttcacaaacgccttgctggcgccatacacatggctgccgggatagggccactgcccggcgatcgagccgatattgataatactcgccccggcgccatggcggatcagcgtcggcagcagggcgtgagtgactgtcaccagaccggtgacgttggtgtcgatcatcgttttccagtcctccagcgccacctcctgcgccggcagcggcgacagcgccagcccggcgttgttgatcagggtggtgatatcggcgaaatcggcgggcagcgacgccacggcggcagccaccgcctcgctgtcacgaacgtcaagctcaataatatgcaccggcaccctggcggcgagtctgtcctgcaaggccttcagtcgcggatagcggcgcccgctcagcaccagcgaccagcccgcgtcggcaaacacctgcgctgccgcttcgccaaaacccgaggtcgccccggtgataaacactacgttgctcgttgccatctcattctcctgtgcggttgtcccttcactataaaaacgccggacgacaaggcacagggccagacgacgggcggggatgtgacaccgtgtcacatcgttatgcgcgcactggctctatccgatttgcgcggccaaggccaatgatgaagccaaccactacgacatgagagagggcagggtatgaagctggcaattcacaacgaggtcgcggtaagcaatgacgaagttcggcaattagatcgcgcctatgtgtttcattcatggtcgatgcagggcaatctcaacccgctggtcatcgccggggcgcaaggctgcgagctatgggattatgaggggaacacctggctcgatttcagcagccagctggtgaacgtcaacattggctatcagcacccccgggtattggcggccatgaagtcgcagctggagaccctggtcaccatcgcgcccgccaccgccaaccttgcccgcggcgaagcggcgaagcgcatcgtcgacctggcgccggcgggcttcagtaaggtgttcttcactaacgccggggcggatgccaatgagaacgcgattcgcatggcgcggctctataccgggcgcgacaaggtgctgtcggcctatcgttcctatcatggcaacaccggcagcgcgatcgccgctaccggcgactggcgccgggtgccgaatgagttctcccgcggccacgttcacttcttcaacccctacctttaccgcagcgagttcaacgccgcgactgaggaagaggagtgccagcgcgcgctggcgcatctgcggcggatcattgaatgcgaggggccgacggccatcgcggcgatcctgctggagtccatccccggcaccgccgggatcctcgtgccgccggcaggctatatgcagggcgtgcgcgccctggccgacgagtttggcatcgtgctgatcctcgatgaggtgatggccggctttggccgcaccggcagctggttcgcgttcgagcaggatggcgtggtgccggatctggtgacctttgccaagggggttaacgccggctacgtgccggcgggcggggtgctgattagcgagccgattgcccgctactttgacgatcacttctttgccggggggctgacctactccggccatccgctggcgatggcggcgattgtcgccaccatcgacgcgatgaaagaggagaaggtggttgagaacgcggcctctatcggcaacgaggtgctgcgccccggtctcgaggcgctggcggagaagcacgccattatcggcgaggtgcgcggtcgcggcctgttccaggcgctggagctggtgagcagccgtgaacaaaaaacgccgctgaccgccgccgacatggctgcgatcaaaggggccctgaccgaagccgggctgctggcctttgtggtggagaaccgcattcacgtggtgccgccgtgcaccattactgctgagcaggtggcgcaggggctggcgatttttgatgcggtctttgctcgctttgccagcctggcgaagtaggggagggggccggatactgttgcccggcggcgcgcttgcacgggcctacggggtgtgagcctgtgagtggatcctgtaggccgggtaaggcgcagccgccacccggcgaaatcaaggataccgtgcctgatatcttgcccggcggcgctgcgcttgccgggcttacggggtgtgagcctgtgaatggatcctgtaggtcgggtaagcgaagcgccacccgacaaaacaaccgcgcatccgctgacctcacctcatccggtgctctccgttgaccaacgcttcgcgatcgaaaaagcgctggatcacgccctccgccataaacgccgcccgatcggacatatgggcgatgacgtcggcatcgtggctgaccagcagataggtcatgccgtgctcctgtttaagacgattaagtagattaaggatttccgcctgtaccgacatatccagcgccgaggtcggctcatccagcagcaggatctgcgggcgcagcagcagggcgcgggcaatggccacgcgctgccgttggccgccggagagctgatgcggatagcggcgcacggcgtcggcggccagacccacctgctcaagggcggtggttactcgcggggcaacgtcgcggatgccgtggatctgcagcggctccgccagggtgcgccacagggtatggttgggatgcagcgaggcgtacggatcctgaaacaccatctgcacgttgcgccgcagatcgccctgaaagcgggcgcccggcataatggcctggccgagcagatccacgctgccgcgccattcacgctgcaatccggccagcacgcgcaaaatcgtcgatttgccgcagcccgaggcgccgatcaggctgaaggtttccccggcgtcgacacggaaactggcggcggagaccgccgtcttcgcgccgaatgtaacctgtaaatcctgaagattaacgatcgccatgggctgtctccgtaaagtcctgggttctgtcgagggtcggcagcatctggccgtaggtgtgggcatttggccggcaggtccacagggtgcgggtgtaagggtgcgtcgcgctcggcagcgcccgcgccggcatctcgtcgacctgtctcccctggtacatcaccagcacgcgatcgcaatgcgcggctaccagcggtagatcgtggctgatcagtaacatggccatctgccgctgcgcgctctgctccaccagcagctcgaggatctggttgcgcaggcgggcgtcgagggccgaggtcggctcgtcggctatcagcaccttcgggttattgagcagcgcgagggcgatcatcacccgctgtcccatcccgccggagagttcgccgggatagcggctgaggaccggcagatccagaccgacggcggcgatggcgtctttgaccgcctcggcgcgcgcgcggcggctgagacgctgatggagggttaacgcctcctccagctgcgtctgaatggtctgcaccggattcagcgcatagcgcgggtcctgcagcaccatggcgatatcgttgccgcgcagcgtgcgccagccgcgggcgctgagggtcagcacatcgcgccccagcacctccagccgttcagcgctcaccaccccgggcttgcgcaccaggcccatcagcgcccgggcggtcatcgatttgccggagccggattcgcccaccagcgccagccgctcgttgccgagggtgaagctgacgttgtccaccacccgggcggtgggatagtcgacggcgagtccctggacggtcagtcggatgtcagtcatgttgcggctccagaatatcgcgcaggccatcgcccagcaggttaaacgccaggctggcaagcaggatcgccgcgccggggatggcggcgatccaccactggtcgaaaatcacctgcatcccgtcggcaatcatcgctccccactccgccatcggcgggcgggcgcccaggccgagaaagccgagcccggcggcggcgaggataatgcccgccagatcgagcgccagccggacaatcgccgacggcagacacagcggcagaatatggccgaccagcagccgcccgccgcgaatgcccagcatctccgccgcggcgaggtagtcgctatggcgcaggcgctgaatttcgctgcgcgcctgacgggcgtaggccggccaggtggtcagggctaacgccagcgcgccgttgaccagccccgggccaagcatcgccacgaacgcgaaggcgaggatcaggcgcggcatcgacatcaccacgtcggtaaagcgcatcagtatccgctccagccacccgccatagtagccggagaggatacctaccagcagcccgacgggcagggttatggcggtcaccagcgccaccagacccagcgccgggcgggcgccgtagagcaagcgcgacagcaggtcgcggccgtagctgtctgtgccgagccagtgtcccgccccgggcccctgcagacgagcggcggcatcctgccagttgggatcgtgcggcgccagccacggggcgaacagcgcggtcagcaccagcaggatcaccagggtcaggccgctgaaggcggcgggtgagcggcgcagacggcgtaaaaacagataagtcggcatcagcgcaccctcggatcggttaaccgtaccagcagatcggtcaggttattgatcagcacaaaactcacgccgatcagcagcgtgccgcccatgatcgccgtggtatccccggcgaacagcgccgtggtgagatagcggccgatccccggccacgagaagacggtttcggtgagcaccgccccttcgagcatggaggtccaggcgagggcggtcaccgtcagcagagtgccgcggatattgggcaggacatggcgcagcagaatcgtcatctctccggcccctttggcccgcgccagcagaatgtactctttgttcatctcgctcaggcaggcggagcgggtcaggcgggtgatgctggccagcgagtaataggccagcaccagcaccggcagcgccagatggccgatcgcatttttaaacgccgcggtatcgccggagagccaggtgtcgatcagcgcaaaaccgctgcgtggctcgacggtgtactgataaatatcgtcgaggcgacccgggcccggcgcccactgcagccgggcgtagaacagggccagcatcagcaggccgagccagaaaatgggcaccgagttgcccaacagggtaaaggtgcgaaccgccagatcccacggcgaaccggcgtaacgggcgcacagcaccccggcgacgatgcccagtaccgcgccgacgatcagcgccagggtcgccagctcaagggtcgccgggaagactgccagcaggtcgtggagcaccggctggccggtggcgctggcgatgccaagatcgccatgggccaggttgaccaggtagtgccagaactgcaccggcagcggctggtcgagacccagctgatggcgaacctggtcataggtcgactggctggcatggtcgccgacgatctgcagtacgcggtcgacgggcgacagcgcggagagcgagaaggtgaccagcaacagcccgaacagcgtgagcagcagcgtaaacagcccctgcagcaggcgggtaaggtgagtggaaaacgatggcatggaaaatggaaattcctggtatatcagcattgtacccggcggcgcgatgccgaccgggcccgggagaggagtcggtcatccgggcagacaaggccgccgtacccggtgacaaaacccgcttacttggtcacgttatcgtaccagaccatgtcggcgttcagtccctgctgatagcccttcacgttgtcacgcaccacgatctgggttttcccctggtcaataaagacgtacggcgaatgctggagcagggtttcctgcatcgttttgtacaggccgaggcgtttcgccgggtccggctccgccaccgcggcgagggtggctttattcagctcagggatctgccagccgttgagcccggccacggtgctggatttaccatcgttccaggcaaaggcgctggcattggagtgggcatcaaagtagtcggggatccacaggcggatcgccgcctgatgctgcttcgcgcgcacccgggcatagacctggctgccggcggcgggtagcagatccaccttcaccccgccctgggcaaagctggcctgcagcgattgggcgatggtgataaacggcggtttgttctccacatcgagggtgaagtgggcatccttaatgcccgctttatcgaggatagccttagctttttgcggatcaaaggtgaacggattagtctccagcgcccccggcaggccggccggcaggaagctttggtgaataaagtactggcctttcagcagatttttggtgatgccctcataatcgaccagccagcgcgccgcctcccagaaggccgggttattgagcagcgggttggcgctgttggcggtattaaacaccaggtagttctgctcggcggacgggatgctcagcaccttcacgccgggtttatcctgcagggcggcaatctggtcagcgccgagatcgcgcgccacgtcggcatccccctgctggatcagcaggcggcgggaagccgggtcggggacgtttttaataatgatgctcttgatcttcggcgcgccggttggggagctggcgttggcctccagcacgatggcctgatgcggctggtagacgcgcattttataggccccgctgcccgccgagtgcattttcagccagtcgttgccgaagtcgttatttttcgcgttcggcgccacctgtttttcatcaacgatagaggcgatgggggtggagagaatattcagcgccaccgccgggctgacgtcggcggtccagtgcagcgtcagggtatggtcatcaacctttttcagctggctggcgatgttgtccggctgccagccgagcacgttgagaataaacgccggcgatttattcagcgtcaccgcgcgggtgtaagagaaaatcacatcttccgggcgcagcggattaccggaggcgaatttggcatccggcttcagtttaatggtcagggttttcgccgccggatcggcctgccagctttcggcgaggatcggtacgattttttcagggttgttgcggtcgggctgcaccagacgctgatagaggctggggaccgtctgaatgctggagagttcgttcgcttccgccgggtcgaggctgacgatatcgtcgagaccctgggcgaccaccagcgtgttgggcggcgtggcggcatgcgcggcggcggagagcgccgacagtagcagtaaaggcaacagttttttggtcatgtgcaatccctgaagaatggttattttattgttttatgcctcgctacgttaggccgcttgccataaggcgtaaagtcaaaataaggatatccttatgctaaaaacgcatattcaagaacgacaggttattgccggtcgcgcagaagcgcctttctccgctgcggggttcttgctataacgcattgtctattgcgaggaggtgggtgtgccggaaatcaatgagtatggccagcaggtgaacgacctggtccctggctggcagggggcgcaagtcctgcggcggacggcgttaaatggccgtttttgccgcctggagccgctggacgttgaccgtcatgcggcggatctgtttgccgcctatgcgctcggcgacaacagcgactggacgtggctggcgtctacgcggccggagagcgtgacggcgaccgcccactggatcgcgggcaaggtgaatgatgatgtcctggtgccgtatgcggtggttgacctgcgtagcgagcaggcggtgggcatcgtcagctatatggcgatcgagcgggaaatgggcacggttgagatcggccatgtcacctggtcgcgacggatgaaaaacaccccgctgggtaccgaagcggtctggctgctgctcaaaaacggctttgaccatggctatcgtcggctggagtggaaatgcgattcgatgaatgtcgcctcgcgccgcgccgccgagcggctgggctttagctgggaaggacgtctgcggcagaggctggtgcgtaaagggcggacgcgcgacagcgatatgctgtccatcatcgacggcgagtggcctgcgcgcgatgcggcgctgcgggcgtggctggcggcggagaactttactgccgacggtcagcagattaagcgcctggaggcgtttcgctaacatcaacctatggggtcaaaacccggaacggcaccccggtcgcgctgcgcttaccggggctacgttacatcgcctcagggtaggccgggcaaggcgtagtcgccgcccggcattgacctgttaacggcgaaccggcgcgtcgccagcgacataatacgtcgcggtgctgcgcggcagcggctggcggccgcgaatggcgtcggccatcttctcgccgatcataatggtggtggcgttgaggttgccggtgatgatctgcggcatgatcgaggcgtcgaccacccgcaatccttccagaccgtggacgcggccctcgccatcgaccaccgccatctcgtcgtaacccatcttacaggtcccgcacgggtggaacgcggtctcggcgtggttgcgcacaaactcatccagttcggcatcgctctggcattctattcccggactgatttcgcgaccgcgatacttatccagcgccggctggttcatgatctcccgggtaatgcggatggcgtcgcggaactcctgccagtcctgctcatgggacatatagttaaacaggatcgccggatgggcgtgcgggtcgcgcgacttcaggcgcacgtggccgcggctgggcgaacgcatcgagccgacgtggcactggaagccgtgctctttcaccgcgttggagccattgtagttaatcgccaccggcaggaagtggtactgaatgttcggccaggcgaactctgcgcggctgcggataaaaccgcccgcttcgaactggttgctggcgccgatgccggtgccgccgaacagccactcggcgccgatcttcggctggttccaccactgtagcgccgggtagagcgataccggctctttgcactcgtactgcagatacatctccagatggtcctgcaggttctcacccacgccggggagatcgtgcaccaccgggatatcgaactgcctgagcagctccgggttacccacgccggagcgctgcaggatctgcggcgaggcaatcgccccggcgcacagcagcacctctttgttggccgtcgcttttgacgggatcgtgctctctccctccagccactcgacgcccaccgcgcgcttgccggcaaaaataatgtgatcggtcagcgcatgggtgcggatggtcaggttcgggcgaccgcgcgcctggtcgagatagccgcgggcggtgctggcgcgacggccctgcggcgtcacggtgcggtccatcgggccaaagccttcctgctggtagccgttgagatcgtcggtacgcggatagcccgcctgcaccccggcttcaaccatcgcctcgaagagcggattattgcccggcttcggcgtcgtcacgctcaccgggccatcgccgccgtggtagtcgttaggcccgatatcgcgggtttccgctttccggtagtagggcaggcagtcgagatagctccagtgttccagacccggctctttggcccagttatccagatccatcgcgttaccgcgaatgtagcacatgccgttgatcagcgaggagccgccgagccctttgccgcgtccgcactccatgcggcgattgttcatgtacggctcaggttcggtctcgtaggcccagttgtagcgcttgccctgcagcggataagccagcgcggcgggcatctgggtgcggaaatcgaaccggtagtcagggccgccggcttccagcagcaggacggtggtgtttggatcttcagtcagtcgtgttgccagaacgttgccggcggagccggcaccaataatgatgtagtcaaattgcaaaaaaacctcccggttaaaatatggactggaatttacccatctcaacctggatggacttcacctgggtgtaactctgcagcgtcatgacgccgttctcgcggccaatgccggagtgtttgtagccgccaaccggcatttccgccggggattccccccagctgttgatccagcagatgccggcttccagctggtggataattcggtgagcgcggttgaggttgggcgtcaccacgccggcggcgaggccgtattcggtggcgttggcgcggcgaatgacctccgcttcgtcggcatagctgaggatcgacatcaccgggccgaagatctcttcgcgcacgatggtcatctcgtcgctgcaatcggtaaacaccgtcggggcgacccacgcgccgttatcgaaaccgtcgcctttcagcgcctcgccgccgcacagcaggcgcgcgccttcgcgtttgccgctctcgatatagcgcagaacgttgtcgcgatgggggaagctgaccagcgggccgaagttggtgtcgtcggcaaacagatcgccggcgcggatgcgggccacccgctcgaggatcttgtgctcgaattccgccttctgtttcgccgggacaaacacccgggtgccgttggtgcacacctgaccggagctgtaaaagttggccatcatggcaatatcggcggcgaggtcgaggtcggcatcgtcggcgataatcagcggcgatttgccgcccagctccatggtgacctctttcagtgatgaagcggccgagttggccatcacttttttgccgctggcgacgccgccggtgaaggagattttggcgatgtccggatgctcggtcagatactggccggtttccgcgccgatccctggcaggacgttaaacaccccgtccggcaggcccgcttcgctgtaaatttccgccagcttgagggcggtcagcggggtgacttcgctcggtttgaaaatcatcgcattgccagcggccaacgctggcgccgatttccacagggcgatctggatcgggtagttccacgcgccgatcccggctaccacccccagcggttcgcgacgggtgtagacgaaggaactgtcgcgcagcgggatctggctgccttccagcgccgggatcaatccggcgtaatattccagcacgtcggcgccggtgacgatatcgacggcggcggtttcgctgaggggtttcccggtatccagggtctccagccgcgccagctcatcgttgcgctggcgcagaaggtcgacggcgcgacgcaggatgcgcgagcgttccatggcggtcatcgccgcccagattttttgcccacgctgcgcgctctcgacggcgcggtcgacatcctcgcgtccggcagcctgaacggtcgccagcacctcgccagtggcagggttgatggtctcgaaggtgcgaccgctggtggccgatgtataaccaccattaatataaagctgctgttctgccattcgggacataacgcctcctcggttatgggttcggtaaatgctgacgaataaagtggctggtcagcgactgcgccagcgttttatccagcggtttgccgctgagcgccgcccgcagccacaggccgtctatcagcgccgccagcccgtagccggcctcctgcgcctgctcgcgcggcagctcgcggcggaattcgtacaccagattcgacagcaggcgacggctgctgacctgctgtaaccgataaagcatcggctggtgcatgctgctggcccaaaaggccagccaggccttcatcgccgcgctgctgatctgcgtctcatcaaagttgccgccgacaatcgcctgcaggcgctggctggcgctgccgtccggcagagcgtgcagacggttgagcaccgcgtcgcgcagctggctggtgatgtcgcgcatggtcgcctccagcagaccatttttgtctttgaaatagtgactgatgatccccgtcgatacgcccgcccgccgggcaatttgcgcgatggtcgcgtcgtgcattccgacttcatttattgcgtccagcgtggcgtcgatcagctgcctgcgccggatcggctgcatccccagtttgggcatttttgccactccattcatcagcgttggttaactattaaagcggtttttgattggacgttcaatataaaatgtgtcttaattgttgcggatttggattttaatagttacaaaaacagtggggatactggatgacagatctttcgcaaagcagagaaaaggacaaaatcaatccggtggttttttatacctcggccggactgattttgttgttttccctgatgacgatcttttttcgcgatttttctgccgagtggattgggcgcaccctggactgggtgtcgaaaaccttcggctggtactatctgctggcggcgacgctgtatatcgtcttcgtcgtctgcattgcctgctcgcgcttcggctcggtgaagctcgggccggagcagtcaaagcccgagttcagcctgctgagctgggcggcgatgctgttcgccgccggcatcggcatcgacctgatgttcttctcggtcgccgagccggtgacgcaatatatgcagccgccggaaggggcggggcagaccatcgaagcggcgcgccaggcgatggtctggaccctgtttcactatggcttaaccggatggtcaatgtatgccctgatgggcatggcgctgggatactttagctatcgttataatttgcctctcaccatccgctcggcgctgtacccgatttttggcaaacggatcaatgggcccatcggccacagcgtcgatattgcggcggtgatcggcaccatcttcggcatcgccaccaccctcggtatcggcgtcgtgcagctcaactacggtctgagcgtgctgttcgatattccggactcgctggcggcgaaagcggccctgattgcgctgtcggtgatcatcgccaccatctcggtcacctccggggtggacaagggcatccgcgtgctctccgagctgaacgtcgccctcgcgctggggctgatcctgttcgtgctgttcatgggggatacctccttcctgctcaatgcgttagtgctcaacgtcggcgactacgtcaatcgctttatgggcatgacgctgaacagcttcgccttcgaccggccggtagaatggatgaacaactggacgctctttttctgggcgtggtgggtggcctggtcgccgtttgtgggcctgttcctggcgcgcatttcgcgcgggcgcaccatccgccagtttgtgatgggcaccctgattattcccttcacctttaccctgctgtggctgtcggtgttcggcaacagcgcgctgtatgagatcatccacggcgacgcggcctttgcccaggaggcgatggcccacccggagcgcggcttctacagcctgctggcgcagtatccggcgtttacctttagcgcgtcggtggcgaccatcaccggtctgctgttttacgttacctccgccgactccggcgcgctggtgctggggaacttcacctcgaagctgaaggacatcaacagcgacgccccgaactggctgcgcatcttctggtcggtggccatcggtctgttgaccctcgggatgctgatgaccaacggcatctcggcgctgcagaacaccacggtgatcatggggctgccgttcagctttgtgattttcttcgtgatggccggactgtataaatctctgaaagtggaagattaccgccgggtcagcgccagccgcgacaccgccccgcgcccgatgggcctccaggatcgtctgagctggaagaagcgcctgtcgcggctgatgaattaccccggcacgcgctataccaaactgatgatggagacggtgtgctacccggcgatggaggaggtggcgcaggagctgcggctgcgcggcgccgcggtggaactgaagagcctgccgccggaagagggtgagaaccttggccacctcgatctgctggtgcacatgggcgacgagcagaactttatctacaagatctggccgcagcagtactcggtgccgggctttacctatcgggcgcgcagcgggaaatccacctattaccggctggagaccttcctgctggagggcagtcagggtaacgacctgatggactacagcaaagagcaggtgatcaccgatattctcgaccagtacgagcggcacctgaactttatccatctgcatcgggaagcgccggggaacagcgtgatgttcccggatggctaatcagggaagcccccgtcggggaaaggctgacgggggcgatggtcgttactggtagttaaaggcgtccgggtggttgtcgaggctgccgctgagggcggcaaacagcacggttttgccatcgatggacagggcatcgctgacgttaagccaggtcagcttctcctggtcggttttttcatcgaccaccgagtaaacgccggacatctgtttgcttttttccgaccagatcaccgcgatacgttcatggccgcagtcgtggggtttgcaggcgcttaacacctgccaggattcgctacccagtttcaccgtctgcgcgggcgaaccggtgccgccggtggtcacccaggcgggcagctgatggcctttgaccatctggttaaacgacgcccgggtggcggcatcgtgagccagactgttcagcgtgacatcgctttgcgccataacgctggcggaggcggctaaggcgacgatagcggtaagagctttaaacatgtttcctcctggacttattccgtcctcataacaagcctctttatagtgagcgtagagaatgattaatgcaaactctgacatattttctgtgaatgattagaaacggtgcgcgcatggacgttacgctaagcgatatgccatgatgcggattgatttattttccaaatatatgcccttgggataaagcagttagcgaagtggcatagttattcaggcgataaagcatggcgtatgtgaatcatctactgacgtttattgagagtaatccggcgctggcggtggggtttaatcttattctgctgctgctctccggcatatttgcccatcttttatgcaaattcttgctgattaaagtggtgcgtaaggtcttctttagtagccacaaacaggatgtgccgctggagaaggatcgacgtatcgccgaaaagctgtccaatttcattccggttattatcgtctattacgttctgcagtttatgccggcgatgccggcatcgctggtgacggcgattaatactatctgcgggatcttgttttttatttttatgtcggtgtttttcaacgagatgctggatattgtcaacagctcctatctgcgaaagaccaaacgtaaaaatcattccattaagggctatatccagataggcaaaatcttagtccacatcctggcggcgattatgatcctcgccgtgatgtcgaacaaatcgccgatcattattatctccagtctgggggccgtggcggcggtactgatgatcgtgttccagcatactctgctgtcgctggtggcgaacgttcagctgtcgtccaacgacgtgctccagctgggggactggattgaaatgcctgacaagaacctcagcggtgaggtgacggatatcgcgctgcacaccattaccatccgcaactgggacaatacgatctcccgtatcccgaccaagaatttcctcaccgagacctataccaactggcaggcgatgttctcctccggggcgcggcggatcatgcgcagtatcgccatcgatcagcactcggtgcgttttctcgaccaggagatgctctcctcgatgctgaccatccgcggggtgagtgagcctctggcgacgctgcttgacggccgggatcccggcggcgtggccgaccgctggtttgtcgataacgggctaaccaacctgaccctgtttcgccactatctgatgcactatctcgccgagcggccggatattattaaggagatgtacattgtggcgagaacgctgaaaccttcgccgtcgggcatcccgctggagatttactgcttcaccacctcaacgctatggaaagactacgaaaacacccagtcggcgatatttgagtacattactgcggtggccggacagttttccctgcgcctctatcagtatcccgccgggcacgatttctggcgtctctcccaggagcacgccgcccggacgggcctgccgccgtcggccgaaggctaagcgctgatctgctggcgccagagggcgatctcctcctccagccaggcgatgaaccgggcgacttccggccggttctccgcctgcggggagacggttagccagtagtgccaggggtaggggacggtgacggcggtgagctgcaccagctcgccgcgggctatcgcccccgccaccagggagcgccgctccagcgccacgccggcccccaggcggaccgcctccagcaccagattggagtcgttcaggcgcaggcctgcggggacgatcggcttttccagccccgcctggctgcaccaggcatgccaggactccatggaaaaaataatatcgctggcggcgatcgcctgcggggtggtcggcaggttaccgccgcgatagccgggggcggcgaccaccagctgttcatcggcaaacagatgccgactttccattccctcccaatcgccttgccccatgcgaatggccagatcgataccctcctgttgcaggttaaccaccgccaggctggtcagcaggcgcaccgcgatctgcggatgccgcgcctgaaagcgcgccagccgcggcagcagccagtggcagccaaaggaggggatcgtcgccagggtcacttccagggtgcggggtttgatctgcaccatgcgcgtggcgtcggcgatgtgctgtaacgcctcgcggatttgcagggcatagagccgtccttcttccgtgatgcgcactccgcggccgtggcggataaagagcgtgacgccgaccagggcttccagctgtttgatgtgctggctgaccgccgaatgggtcacgctcatctcgtgggcggcctgcgttacgctgccgaggcgcgccaccgcctcaaagctgcgcaggctggcgacagggggaaaatctgccatggtgatctctcagtcagtgagtcgatacgttaacgttactaccgggttagcgggttttatagccgccgcgaacaggctgaaaaaggggctaaatgctgcctcagtcggtatagcacaagggggactggagggctacagcgagtcgccaatctgttagttttactaaccgttgcggtaagtatctggtgatattcgcggcatcggttttccagtaaggtaaagccgcaacctctttatcgcaggcaggagtgacgatgaaactcattggtatgatggattcaccttatgtaagacgcgtggcggtttctctggcgctctatggcgtggaattcgagagcctgccgctatcggtctttagcggctttgacgaattttcccgcattaatccggtggtcaaggcgccgacggtggtgctcgataacgggacgcagctgatggactccaccctgatcctccactatttcgaaacgaccaatccggccgggcgccggctgcttcccgcgcatcccgaggcgctggcccgcgatctgcacctgctgggggtgatcctcgccgcctgtgaaaaagcggtccagcatgtttatgagcaccgtctgcggccggaagagaagcagcatcagccgtggatagcccgggtgaccggccagctgctggccgcctgtcgggagtgggacgcccggctggcagaccgcgccgccgccgcgcagccggatcaggtgctggtcaccagcacggtggtctggtcctttatccagttgatgatcccggcggtggtgtcggccgcggcgtttccgcatattcgcgcgctggcggagaagggggaggcgctgccggcgtttcaacagtatccgctgggttaacggcagggggcgttggattgcagccggacgaagacgttatcgcccggctgggttgcgctcagcgtcttgccagcgtcaccgcgtgttgccaggactgccatcgttgcacaagccgatgatgccggatcaggtctggtgcataagtgatgtgttctggtaaaaagggctgaagctctgccaccgtcagcttgtgcaacgctttacgcgccagcagtgccgcgccggtcgccgacagctcggccacatcgctgcgcatcaccggacaacctagcaggtcggcctggtactgcattaaccagtcgtttttggtgggtcccccatccaccagcagcgtgttgagcgtaaagccatgatgggcacgcatcgcagtgattacatcggcaatctggtaggtaattgattctagcgcggcacgaatgagatgggcccgcttcacgccccggcttaatccatggatcaaaccgcgggccttatcgtcccaccagggggcgcccatgccggtgagcgccggcacaaaaaagacgcctaaggtggaatctaccgaacggggcagagcattcagcgcctgggccagttcggcgggagagcgttcgctcaatccggtactgtcggccatccacgccaccgcatcgccggtatggggaatgttcccctcgagtgcgtagaccagcttttctccgtcgtgccaggccaccgtggtggcgagattgctgacgtgaaacgccaccgaatcgacgggcgccatcaccgaggtccctgtaccgtaagtggctttaacgcaaccggcggcgcccagaccgtgggcgaaaagggcggcatgcgaatcgccaatcatcgccattaccggaatgccatcagggagggtggctaaacccgcggtgtaaccaaacaggccgctcgaaggtttaattaccgggagtgctgcacgcggaatgccaaacagggcgagcatatcggtatcccagtccgctgtgtgcaaattcatgagctgcgtacgagacgcgttggcataatcacaacaaaaatgctggccttgcgtcaggtgccagagcagccagctatccaccgtaccgaggcaaatctcgccatttttcgctcggttcagaccatccggagtgtggtccagcagccagcgcattttcgaggcggaaaagagcggggcgactggcaggccggttaccgccttgatctgcggctcatgaccttgttcacgcagcatgtggcaaaatgcggcagtacgtgcacattgccagctcagggcgggcgctatagcctcgcccgtttcccgataccagcccacgacggtttcgcgctggttgctgatcgccagggcggctacacgctccgcgccaacggcggccactgcgcgagaaatcacctccagcgacgcggcaagcagaagctccgctgactgttctacccatccttcctgcggcgtagcgatctcaagcgcgcgggaaaattgcgcaattacccgcccgtggctgtcgaaggcaacggctttggcattggttgtgccctcatcgagggcaataataatatccttgtttaccgacatagcggcctccggcctcactggtggagataggtcgacacgcccaggtagcgcgtaaatgcctcgtgcaaaattgcggcactggcggaatggttcatcgcgacatggtgctcaaagccattgcggcagatccacgacagcagattttccaggtggggaacctgaatgaccgcccgacagcctaccgtatcgaggggatcgtcaactgactgaccttctccgacgtaggctttgatttcgccagtcaggtcgtcggtgctgaggcgaaaataggtcagcgcgccgcttttcatgcgaccatgcacggcaccgcaggtgttttctttgccgacggtggtgccgataatatcggccgttcccatgtgcggcgactcaaggctggccgaggcaaagttcccgcaatgaaacagcacacatttatcgcgatcgtcgccgaagttattgttccagtccgcgatcgaggcggggctcaggttgctgctggcgagcgcatacatggagagcgcgcccatgacatcgacctcacaggcgcttggcatcagttgtccggacatcacgctcatgatggagcagacgttaatccccagattttcctgcagcgaggtccagcactgaattgcggtggtgtcgatgtcgttggcaacaatccactcgctcaggaccacaaacagttttgccatggtgaccagtttatctgccggaataccgctggcgtcggcattatcgatcagcaggcggcgcttctcatccacacgaatatcgtcatcacgcagggctttaatccgggtaaacacctctgacagatctaacgtttccactgcgatgcctaaacgttcgagcagcttttcgctgtagcgcacggtgttaaagcccgctggacgggcgccgatcgcgccaacgcgcacgccgcgcatactgttcaccacgcgacatatctgcgtgaagcgccgcagatcctgctcaaacacttcgccactgagcgcgcagacgtgctgggtggtcagcgtaaacgggataccgtactggcgcaggttgttgcaaagggaaattttgccgcagaagctatcgcggcgcgtcgacaaccccattttatccagattatcctcttcggcctgaataagcaccgggacgttgagaccggagaggcgcagcgtttcggcgatggctttctcatcgccaaagttgggtaacagcaccacgacaccgtgaatattgtcgcggtggctgcggaacagctcggcgcaaattttggcatcctgccgggtttccacgccacccagttccgtctgggatggatcaagcataatggtgttaatcccaagacggctaaacagggctaccgcctgttcgcgcgcttcggcgaccagatagctggggaaaaatccccggttgccaataatgacgcccatggtgagttgttgaggaattcgggacattgcgttctctccagtaagatgttcttgttatttttcaggatgctttttttatgtgcagcttgcgggcgtgcttcaccaccccggcggcatcgatttcatggcgcgcgcgcgtggcggcgcgatcggcggcaatggcgtattgcccgtcaggaatacctaagcgccgcaacgggatcgcgcacccggcctcggccagcacttctgccaccaggctcccgacgccgccgttgacgttgtgttcttccaccgtgatcgcggccggacaggactggattgccgccagtagcgcctgggtatcacaaggacgaatagatgggacactgataacggtggcgtcaataccttctgcagcgagttgtgcggcggcttccacaatttcatgtaccgttgagcccatggcaaccagcgcaatatcgcgccccagacgcagcacatcaatgttgcccggaacaaaccggtaacgttcatcatgcagttccggcagcgctttaccgtcgaggcggatatagactggcccgacgtgggcaagggcataatcaataatctgccggcactcgccgggactggacggcgcgtaaatttcaatattgccaaaaccgcgcagaatggcgatatcgtcaatactgtggtgggtgctggccagtggaccgtagctggcgcccgcgttcagcccgaacagtttgacgttggtgttgttgtagcaaacgtcgaccttaatctgctcattggctcgtgagatgaggaatggcgcggcgttgcaggtcacggccactttcccccccagcgccagaccggcggcagcgccaaccagcgtctgctcggcgatgccgacgttgaccagccggccagggaatcttttgataaacggagcaattttcgccgttgaggtggagtcggccaccaccggcaccagatccacgccgcggtctacggcatcaataaaggcattcaccatcaccgtggcgagatgttcgctattactcatctttcagttcctccagcgccagttcaatttcttctcctttcggtacccggtgatgccactcggggcgtccctgaataaaggaaatacccgcgcctttggtggtgttagcaatcacgacgtgtggtttcccgttcggctgaaggccctcaagggtggcgaccacctccgccatatcgttgccgttgcactgcgtaacctccatgccgaaagcgcgccatttttcatccagcggatcggtattcatgatctctttggtcgcaccggccagctgcagattatttttgtcgttgataataataaggttatccagctggtagtgggcggcgaccagcgcggcctcccagttgctgccctccgccagttcgccatcgccggtgacgacaaatacgcgacgcgggttgttatcgcgtttcgctgccagcgcaatgcctaccgccacgggcagaccatggcccagcgcaccggtattgagctcaatacctggcgttttgtgctttaccgggtgtcctggcagagccgagtcggcgtgttgataggttgccagccagtcaacgggaataaagcctgcttcggccagcacgcagtagtaaccaccgacagcgtgccccttcgactgaatatagatatcgcggtcgtcgctctcttttcgcgcaggggagcagttaaggatgcgaaagtagagggcggtcagcagttcgacttgtgacagatcggcaccggtgtggccgcctgccgggctttccgcattcaagacgatgatgcggcggcggatggcgcgtgctttttgttctaactccttaacggagagtgaaaacggattcataaaacacctcttgaaagtaaattcttgtatgaataaatattccagcagggtaaaaaaacacttcccatcctgactacctttaatcgtcgacaaaacaaggtattaataagtgattgaatatatattcactactgatttattattcacattggtaagatatgccctgtcacggggtttgtccacgatttgtacggcctattttctaaaaaaggagaaaacgatcacatttggatcgtcgggaaaagggcgctgcgcttgttatctattcaatgatgcataaaaataacgagcagaaaacagaggggaatgccatgtcgaagcaggatgaacagcggttgctggtgaagatcgccacgctttactacagcgagaataaaaagcagtccgagatcgcctcgctgctgcatctgtcccagtcttttgtttcacgggcgcttacccgctgtcagaaagaggggctggtgaaaattaccgtggtccagccgacaaacatttttgtcgatctggaaaaggcgattgaggagcgttttggcattcgacaggcgatagtcgtggatgtgggcgagaacgccagttacagtcaggtaaagcatgccatcggcagcgcagcggcgcactatgtcgaaacgcggctgcggccggaagacctcgtggggatctcgtcctggagcagtacgatccgctgcatggtggatgagatgcatccgcagaacattcgcgccgccggggtgattcagctgttgggcggcgtcggtcccaacggcaacgtgcaggctaccattttaacccagcagctggcggctcatttaggctgcccggcttggctgttgccgtcgcagagtattgagcactccgtggaggagcgcagccgtctggtaaacagtccggacgtcgcggcggtggtggcgaaatttgccgaagtggatgtggccatcgtcggtataggtgaactggagccttcgcagctgctgaaaaattccggtaactattataatgaaaccatgctccagctgctggcggcgcgcggcgcggtgggggatatctgcctgcattactataatgcggcgggcaaaccggtactgagccaggatgaggatccggtgatcggtatggagcttgatcaaattcgtcgttgtccgcaggtgattgcgctggctggcggcgtggacaaagagaacgccatccgcggcgcgttgcagggcgactatattgatgtcctgatcaccgacttcccgaccgcgcgcgcgttaattaagggctaagcggggggagactggcgtgcctggcgcgccagcgtcgccagttcgtccgcgctgaggcgagtcatccgcaatacggtttcagtgtccatgccgttctctaacatcatcagtgcgatgcggcaggcttcgcgatgctcacccgcctgtaaaccttcgttcaagccttcctgtaaccagcgttgttttccctcttcgcgccctttctgcttcaggtactcggcaatcgtcatcagggtatcctcatattgcggcagacgttcgaccagctggtcgataaagttttccgggtcggcgctattgccatgcagcgacatataggtaaataacgttttgaactgctggtggtcagtgtatcccatcagcaccacctccaccaactgctggaggatatggctgagatcgcgttgacggatgtgtttctggaccagttccagaagcgcgatccgccgatgctgtaatatggcgtcgtcgggaatatcggtcacatcgacgagcggaaaggccccgagataaagctgttttgccggtgagtcaggtgggaactcgtccagccagcacagtgaaaagggatagggagaaatgctgccatgataaaacagcatgggaattaccagcggcagcgctttatggccgcgatcaagatgctgttgcatggccgcgagggcatagcgcaggagtctgaacgccatatggctgtccggggtgctctgatgctcaatgacgacatagatatagccctctcccttgctggtatgcagagagtagagaatatcggaatagctggcgcgcaggttgtcctcaacaaagctcccggattccaggtgcagagtgcttaagtcgcacagttgccgcagcgcgggcggcagatgaatatccagaaaatcgcgtgcggtttcgctgtcgcgcagaaagcgcttaaacagactgtcgtgcggggtcgagtgaggatgttttttcatggcttccttgcctggcagagcagagtggcgggatgctaccaccgcttgccgtcgggcaggatttttcgatgagattttgcgaagcgcctcggagaaaggcgcatcgtgagtcaggcccgctccccctgtggcctgagccacaggaggtcttgcggttacttattctccatgaccgctttctgggcgaccaccgccgccttctgctgcatccggttttgcatctgatcgataatgaccgccacaataatcacgatccctttgatgaccatctgccagaactcgcttacccccatcatcaccagcccgtcggcgagaaaaccgatgacaaacgcaccaatcagcgtacccagaatggttccccggccgccggccagcgatgttccgcccagtacgacggcggcgatagcattcatctcaaaagcggtaccgttagccggatggctggccagcagctgtgcggagaccacgatcccggctatggcggcgcaaaagccggacagcgtgtagaccagcactttaatttgcttcactttcacgccggatagctcggcggcacgctcattgtcaccgatcgcataaacatggcggccaaaaggcaaacgccgggcgatataggcgatgatcagcgccaggaggatcatcagccagatggcccacgggatgccaaagagcgcacctgcgccaatttcatcgaaacccgtgttgcccagctgcggattgcccgcgagcccggggaaggtttggccatcagaggtcagcatcgcggctccgcggagcacatacatagtaccgagggtgcagataaacggcgccacattgtagcgggtaatgatccagccattaacggcgccaatcagcgcgcctatcagcagcaccaggggcacaatgacccacacgcttggaaaaatggcgataccgaacatcggcaagacgatccctttggtgataagccagccggctatcattccgcagagaccgagcgtagcgccaatcgaaaggtcgataccggcagtgataatgacaaaggtgatccccaacgccagaaaggcgttaatcgcaatgtgtttaatcataatcaccatgctgccagcggataaaaaaccgggcacggtcatcgtgaagaagccgacaatcaggaacagcgcgataaaggtgcgcagttttaataacaacagcaggatattttcacgggagagagaggctccgccgcgcggcgccagtgcgaccgattgtgtcattttcatcttagaacccctgagcgcttgctgaaaccagcgccgactcttcggcctggtcacgaacgatatcggcggtcagtttgccgcctgacatcaccaggatacggtcagagaccgccatgatttcttttaaatcggaggtggagaacaccaccgccattccctgctgcgacaattgcaccatcatgcgaaacacatcccccttggcgccgatgtcgattccgcgcgtaggctcgtcaagaaacagcaccttcggattggttaacagcgaacggccaataaccaccttttgctgattgccgccgctgagcgcctggatctcgacttctggtgatgagaccttgatggatagattgccaattgtgctggcgacgacggcctcttcctctttattggcaatggttaccccgcgctgaagacgacgccacaggctggcaatggtcagattgctggcgactgaagagatcggaaaaatcccggtccgcttacgatcttccggcaccagactcatgcccatgcggatgcgttcggccgtggttaaccgctggggaaccggtttgctgtccagccagatcttgccaaagtagtggcgcgctgtccccagcagacattcaaacagctcggttcgtccggcgcccatcaggccgtagatcccaataatttcaccggcatgtgctttaaaactgacgttatccaccaccgtattgcccgcggcattcacgcaggtcaggttctccacttccagcagtggggcaccgaagcggcgattcgggggaagaaaatgacttaccggatcgcttcccagcatttcacggacgatccatggcacatcaatttcactcaccctggcctccgcctggaatttgccgtcacgcagaatggtaatgacgtcgccgatggccatcagctcttccagacggtgtgagatgtagataatggacaccccctgacgcgtcagctcgcggatgacccgaaacaggatatccacctcggttttgcttaaggcggatgtaggctcatcaaggatcagaatgtccgcattttccgccagcgctttggctatctcaaccaactgctgctgaccgaccttcaggttacccaccagctcccgcggcgagatcggctgatcgagtcgctgcaacagctccgcggcttgtcgttcctgctctgcttcgttaattggcgtaagcccgcgctgtagctcgcgaccaagaaagatattttccgcgacgctaagattttcaaacaggttcagctcctggtggaccataccaatgccgtgggcggcggcctcgcgggtgctggagaaatggactatgttgccgttgagttccatttcgcccaggctcggctgttgcacaccggcgagaattttcatgagcgttgatttacccgcgccattttcgccgatgatcacgttaactttgccacgccagacgttgtagtcgacgttatccagggccaccgtgccggggaacagcatggaaataccacgggtgcgtaaaatgatttcctctgcgggtgaactggccatcagcgcgcctcctgttttagctcaagagcggccgcatcctgcaggctgccgttaaccaccgtgaccgcaaagagaatatcgataggcttgcctgtccagctcgcgtccactttcggcaacgattttattgcctcccggttgtaggcgcgtgaaagctgcgcaaactgcacctggttggtaaagtcttcaaatttaaaaccgctggcatcgcgaatggcgttgcctctcatgacaggacccaactgcacgaccaacggctggcccagtagcgtaagagtgagcttttgctcgcgtgggttgctgacgtcagtcccggtcacctcgctgttcaggcggacaaagacgctctgtggcgtagcgccagacgcctggcgcactttttccagcgcagtcgcgtccagcgcatgttggttcgctgcgtcaatcactcgagattgccaggtttgttgcgcgatctgctgcggggtgagatggtcgaagctgggtttcgcgttcgggtcggcaggcagcactggcttgccattctcatctaagtccaccaccgtgcaggccgtcagcaacagggcggcgcagcccatcagcacggcgccccattgttttaaccgcatcatttccgccttactcgctgaggttgaacatgttgagttttttcgcattgccactatcgatgaggatgcagtccatcaactgcttctcttctttctgggctttcccgttcttcaggaaaaagtccgcctgttccacggccatttgcgcctgcttccagccgggctggagaactgtggccttaatgttgccctgcttgagtatcgagtcgcgcgtgtagtcgctgccgtcgaagccgacaacaatcacgtcgtttttacccgcggctttcagcgccgcttccgcccccagcgccatggtatcgttgccggaaatcacgccgacgatatccggattcgtctgcagaatggcttccatacgggtaaaggcctccgtctggctccagttcgccgtctgctgggcgaccattttcatttccggatagtcgtccagcacatcgtgataaccctgcgagcggacgctggcgttagtgtctgactgacgacctaatagttcgacatacttgcctttaccgttgaggagactggcaaacttttctgcgccaagctgggcgccctgatagttgttagagacgatctgcgccacggcgacgccggttttattgatctccctgtcgattaaaaatgccggcacacctgccgcttttgctttttccagcgggccgacggtagcatccgcgccagcattatcaaggatgatggctttggctttccgcgcaatagccgtttcaatcagttggttttgtttgttgacgtcgtcgtcgtgagaggcgaccagggtgctgtaacccagttcttttgctttcgccgctgcgccgtcagcctcggctttaaagaaaggattatcatgtgaaggggtaatgattgcgatcaggccattatcggcggcgaaaagtgagccagatgcggccatcatggaggcaaacagaacagactttatcagggtagttttcattattatctccgcattgaatatatattcaataatgatttattattcaatgtaaccataaagcggccagtcagaactgtctacggtttgcacaggtaatttcttaaaaagcgaaaaggatcacgcttcgcgagtcgggcaggtacaggtaataacgagatcgtcttttatcagatgattgatttgaagggggaaatcagcaagttgcagggagaagctggcggtaaaacgtaaatggatctgctgcgtagtgagtgccacaatccgggcgctgtggaagccgggcaggccggaagcgtgtgaggaccaggccttaaacccactctcttttgccgaaaacgccagcgtcagcgccagcgggaagggcaggccgctgtgcagcagcgccgttttttccgccgggctgataatgctgctctccagctccgcggccagctgtggggtaaaccggcgctcgatatcgacgcccaccggccgatcggcgatcaccgccagcgcgcgctggccgcaatgacttatgctgccgaaccagggcgtgggccacagcggctggcgccgatcgccgatggcgggaagccgtttctcccccacctcgcgcagggcgtatgccgcggcgatgcgtccggccaggtgctccgcctgccgcttgcggccccacccggtcaggctggcgtgatagggcagccagaacagatcttcaggctggaaagtcgccgggtcgaagtcgatctgctggatggtatagccggccagaggcaaaacggtgcgatggtggcgcataggataaggttaccgcggttgcccccgccctttgtccagcaagggcgggggagggagaacccgctatcagaagtgggtgttgacgctcaggtaccaggtgcggcccgattcattgtaggtctcggcgccggcgccgtacatcgtgccggtggcgcccccggtggtctgggcgttgcccgcgcgccagtggcgcttatcgaagacgttatccacgccgccggtcagactgacgtatttggtgacgtcccaggtcgcgctcaggccgaggatgctgtaggggctaacctcgttcttctcgctgccggtgaccggttgacccttgtagttgtacttcttcggctcctgcttgccgtaccaggtgaaggtcgactgcagcgaaacgtcatcgcgaacctgccagctcagggtggagttcagcgtgtattccgggataatcgacagacgatcgccggtctctttgttcttactctgcagcatataggtgatgttgttggtccagttgacggtctcgctcaccggaacgttcaacgtcccctccagaccttccaccaccgctttcggcacgttttcccactggtagagatcggtacctttattgttttgatagaccggggcatagcccgcttcaatcttgttgcggtagtcgttgcggaaccaggtgacgcccgccagccagccgtcgcgtttaaactcgaggccaatctctttgttgatgctggtctcggcttttaagtcgtcattaccctgcagatagcagccgtctttactggcgtagcagccctggcctttactgtagagaatgtagttcgggttggtctgatacaggctcggcgctttataggcgcgggcgatgcccatcttcagcgtgaagtcatcccacaggccctgcgacaggttgagggacgggctccagttattgccgacaatgctgtgatgatcgaaacgcagcgccggagtcagcatggtggtgtcggtcagctccatgttgttctcggcgaacagcgagaagatttccgcctgcgagtacgggctgcggccggtgctgtcgtagcccggaatttcgcctcccgacagcgcctgggtgttggacgcgttatccttcatccgctgttgattccactcgctgcccagcgtcaggttctgattaaccagatagtcgaagggaatgctgacttcgctgtgcagcatcacatccgccagatcgatatccgtgaactggttgctgttaaagatcccctcggtgccgccggccaggccttcgcctttgcgcgagttgcgggtgcgttcgtactgcgcccagttgctggtggtcaccccgttgtcccaggcgccgttccaggtaaccgagtaggtgttgcgatacagacggttggtctctttgccgtagttctcttttaccaggtcgttggagttggtgttctgggtgtcgccggcgtagaggttgccctggcggctgtagccggcctcaaactccagcgactgcatcggagcgaattcccagcgcaccagaccatcgatgtttttgtttttcaccccttcgcgcccggccggcagagtatcggcatagatcccggtacgctcggactgatggccctggttgatatcccaggcgtcggcctgcgttttgtcgaggttaccgaacaggcggaagctaaaatcgccgcccagcgggccgctgaggctgaagttagtgcgtttggtggagccttcatccttgtgctccggggcgttcatataggtgttccatgagccgtgccactcatcgccggtttttttggtgatgatattcaccacgccgccggcggcgccgttgccgtagcgggcggcggccgggccgcgaatcacttcgatgcgttcgatcatctccggcggcacccagctggtatcgccgcgggtgtcgcgctcgccgcgccagccaaggcgcacggagttgcggctggtgaccggcttgccgtcgatcaggatcagggtattttccgggcccatgccgcggatatcaatctggcggttgttgccgcgctggccgctggtggagttgccggtcaggttgactcccggcatggtgcgaatgatctccgagacgtcgcgcgccggggggcgtttgcggatctcatcggcggtgatggtggagacgcccggcgcctgcaggttctgctcggcggcggtgaccaccatggtctcttcagcggcgctgtttttatcgtcggtggcggtttccgctgcgcttaacggaaaagcaaccccgtaaattcccagattgaccagcaaggccagggatttgatcctgttattcattgttattcctgctttttgtcgccacgttccccaaacgccccttcccaccgggaggggaggcggcataaatgttgccaaaagcgggcaaaggcactccgtcgctggctgaataagcccgatttgacatgttctgatgaaagacgcgcttcccacggcgcgctaatacgctattgcaaatgcaaatagttatcaataatattatcaataaataatgacaattaattaaaaaagtcacgctatacatagggttaatgacagaatgttaaggacaggaagcgaggagtggtggcaaaccctgcgggggccgcagtgccgcgcagtggatgacgccatcgaggtaacgttctggtggcgggacccggcgggggatgaaacccgctctccccatcgtcgggtatggctctatatcaccggcgtgaccgaccaccatcagaatgcgcgtccgcaatcgctgcaacgtctccccgggaccgacgcctggttctggcgcactacgctgtcgccgacctggcgcggcagctactgttttattccctccgaccgtgacgatgatttttcccctgaggtgttcagcgctaatgcgcccgaccgcgcgctgctacgcgaaggctggcgcaaactgctgccgcgggcgatagccgatccgctgaacccgcacagctggcggggcggacgcggccatggcgtgtccgccctggagatgccgcaggcccccgcgcagcctggctgggacccgcttaatgaggcgcatcctgccgcccgttgccttgagtggcgcagcgcgcgtctgggcaaccatcgccgggtctggatctacaccaccggcgaggctgtcgacccgcaaacgcggccgctggcgatcctgctcgacggccaattctgggccgagagcatgccggtgtggtcgccgctggccgccctgacccgcgaggggagactgccgccggcggtctacctgctgatcgacgcgatcgacaaccagcgccgcggggttgagctgccctgtcaccgcgatttctggcttgcggtgcaggaggagctcctgccgctggtccacggctatgccccgttcagcgaccgcccggatcggacggtggtggccgggcaaagcttcggcggtctggcggcgatgttcgccgctctcaactggccgcagcgctttggctgcgtgctcagccagtcaggctcctactggtggccgcaccgtgatggccgcgggacgggctttatcggcgaacagcttcgccagggtgaggtgtccgcggccgggctgcgcgtctggctggaagcgggccaacgcgaaccgatcatttttcgcgcgaaccaggcgctactggcgcaactcaccacaacacagcagacgattttctggcgtcaggttgacggcgggcatgatgcgctttgctggcgcggcgggctgacggcagggcttatccagctctggcagcctctgctgtcgcacccttagcatcgcgttttacgacaggagtttgatatgcaattcagtaaccccttcgacaatccgcaagggcagttttacattctgcgcaatgatcaacagcagtacagcctgtggccggcgcactgcgacctgcctgccggctggacggtggtgtgccccccgcagtcggccgaggcctgcaacgcctggctggcggccaactggtcgacactgacccccgcccatcatgcgtcataaggagctgacaatgaccactcgtttaccgctggttgccgcgcagccggggatctggatggccgagcgcctctccactctgccaggcgcctggagcgtggcccactatgttgaactacgcggcgccctcgacccgacgctgctgggaaaagcgattgtcgccggtctgcagcaggcggacaccctcagcctgcgctttgaggaagaggagggggaagtctggcagtggctggcggccgaccgcacctttggcgaaccgtcgatcattgacctgcggacggcgccggatccgcatcgcgccgccacggagcggatgcaggcggatctggcgcaggatctgcgcgtcgacggcggcaacccgctggtgtgccatcaactgctgcgcgtcggcgacgactgctggtactggtatcagcgttatcaccacttgctggtggatggcttcagcttcccggcgataacccggcagatcgccgccatttatcgcgcctggcagcggggggaagctactcctgagtcgcctttcacccccttcgccgaggtggtggacgagtaccagcgctacgccggcagcgaggcctggcagcgggataaagctttctggcaggcccagcgccaggcgttaccggcgcctgcctcactctctgccgcgccgctgggcgggcgcgccgccgggagcgatatctggcggatgaagctggagatgaacgccgacggcttccgccgcctggccagccatgcgccgcagtgtcagcccgctgatctggcgctggcgctcaccacgctgtggctgggccgcctgtgcaaccggatggactacgcggcgggctttatctttatgcgccggatgggttcagccgcgctgacctcgacggggccggtgctcaatgtcctgcctctggcggtgcatattgacgcccgggagacgctggcggacctggcgatgcgcctcgccggtcagctgaaaaagatgcgccgccatcagcgctatgacgccgagcagatcgtccgcgacagcggcaaagcggcaggggacgaaccgctgttcggcccggtgctgaacgtcaaagtctttgattaccagctggatatcgatggtgtgcaggcagtgacccacaccctcgccaccggcccggtcaacgatctcgagctggcgctgttcccggatgagaccggcgggctgtcgctggagatcctcgccaacaaggcccggtacgacgaagccgagctccgtcgccacatggcgcgactgaccgcgctgctggcgcagttcgccgccgatccggcgctgcgctgcggcgaagcagagatgctctccgccgacgagctggcccggctggcggcggtcaacgataccgctgtgccgctgcctgccaccaccctcagcgcgctggtggccgaccaggcgcggaagaccccggatgcgccggcgctggcggacgcccgctggcagttcagctatcgcgagatgcgtcagcaggtggtggcgctcgcgcagctgctgcgtcagcgcggcgtgaagccgggcgacagcgtggcggtggccctgccgcgctcggtgttcctgaccctggcgctgcacggcattgtcgaagcgggggccgcctggctgccgctggacaccggctacccggacgaccgcctgcggatgatgctggaagacgcccggccatcgctgctgatcgccacggaggaccagctggcccgcttcagcgatattccggggctggaaagcctctgctaccagcagccgctggccgccggggatgacgcgccgctggcgctgtcaaaaccagaccataccgcctacatcatctttacctccggctccaccgggcggccgaaaggggtgatggtcggccagaccgccatcgtcaaccgcctgctgtggatgcaggatcgctatccgttatctgccgacgacgtggtggcgcagaaaacgccgtgcagtttcgacgtgtcggtgtgggaattctggtggccgtttatcgccggcgcgcagctggtgatggccgagccggaggcgcaccgcgacccgcaggcgatgcagcagttcttcgcccgctacggcgtgaccaccacccactttgtgccgtcgatgctggcggcgtttgtcgcctcgctggatgcggacagcgtggccgcctgccgcacgctgcggcgggtattctgcagcggcgaagcgctgccgacggaattgtgccgcgagtgggagcgcttaaccggcgcgccgctgcataacctgtacggcccgacggaggcggcggtggacgtcagctggtacccggcctgcggatctgagctggcggcggtgaccggcagcagcgtgccgattggctggccggtgtggaacaccgggctgcgcattctcgatgccgcgatgcgcccggtgccgccgggggtggcgggggatctttatctcaccggcatccagctggcgcagggctatctggggcgcccggatctcaccgccagccgctttatcgccgacccgtttgcccccggcgagcggatgtatcgcaccggcgacgtggcgcgctggctgacgaacggcgcggtggagtaccttggccgcagcgacgatcagctgaagatccgcgggcagcgcatcgagcttggcgagattgatcgggtgatgtcggccctgccggacgtggggcaggcggtgagtcacgcctgcgtcttcaaccaggcggcggcgaccggcggtgatgcgcgacagctggtgggctatctggtctctgactccggcctgccgctggataccgcggcgctgaaagcgcggctggcggaacagctgccgccgcatatggtgccggtggtgctgatgcagctcgctgagctgccgctgagcgccaacggcaaactggaccgcaaagcgctgccgctgccgaccctcggcggcgagcgcagcggccggccgccggagcccggcatggaaactcttgtcgccgccgccttcagccagctgctgggctgcgaggtgaacgatatcgacgccgatttcttcgcccttggcggtcattcgctgctggcgatgcgcctggcggcacagctcagccgccagctggcgcggcaggtgaccccggggcaggtgatggtggcctcgacggtgggcaaactgagcgcgctgctggccgccgatctcagcgatgagcaggctcagcgcctggggctggatacgcttctgccgctgcgcgagagcgacggtccgacgctgttctgcttccatccggcctccggcttcgcctggcagttcagcgtcctggcgcgctatctcagcccgcgctggtcaattaccggtattcagtcgccgcgcccgcaggggccgatggccagcgccgccagcctcgacgaggtctgcgagcatcatctgcaaacgctgttggcgcagcagccgcacggcccttattacctgttcgggtattcgttgggcggcaccttagcccaggggattgccgcccgcttgcgccagcgcggcgaagcggtggccttcctcggcctgctggatacctggccgccggagacgcaaaactgggcggagaaagaggccaacgggctggatcccgaggtactggcggagatcgaccgcgagcgcgaagcgttcctcgccgcccagcaggggcaagcctccggcgagctgttcagcgctatcgaaggcaactatgccgatgcggtgcggctgttaactactgcccacagcgcgaagtttgacggcaaggcgacgctgttcgtggcggagaagacgcggcaggaggggatggatccgcaggtcgtatggggcccgtgggtgggggaactggaggtgttcagccagaactgcgcccacgtcgatatcatctccccgcaggcctttgaggccatcggtccggtggtcagggagattctggggtaacggttgagttcgggctacagcaggtagcccggctcagcgtagcgcaagccggggaaagaggagattaccggcggcccagcgggaccaccagcggcgtatgcgccaccggatcttcaatgatcgtgcagcgcagaccgtaaatccgttcaatcagatcggcggtgacgatctccttcggcgccccctcggcgacgatcctgccgtcgcgcagggcgatcaggtgggtggcgtagcggcaggcctggttaagatcgtgcagcaccgccgccagggtatagcccttctcgcgattcagctcgctcaacagttccagcaggtcgatctgatggctgatgtccagccaggtggtcggctcatccagcagcataatcgccgtttcctgggccagcaccatcgcaatccacgcccgctgccgctggccgccggaaagcgtgtcgacgctctgcagcgccagatcgctgatcccggtcgcccgcatcgccttgttcaccgcctcttcatcttctttgcgccagcgggtaaacagcggctggtgcggatagcgcccgcgggccaccagctcctgcaccgtgatatcgccaggggtggtggcattctgcgccagcagcccgatgcggcgggcaacctctttactggcgtactgctggatctgcgcgccgtcgagccagacgtggccgctggcgggcgtcatcaggcgactgagggtgcgcaatagcgtcgacttgccgcagccgttggggccgataatggcggtgaagtgaccgtcagggatggtcacgttcagcgactcggcgatggtcttgttcccgtaggccagggttaactgctcgccgcgcaaacgggaggggacagcactcattttttgcgggactcctgaatcaacaatgcaataaggtaaataccgccgaggctgacggttaacacgccaaccggcagctgccacggcataaacagccgttgggcgccgtaatcggccagcgccagcagcagcgcgccgcacagggccgactgggtcagtccccagcgggccgtgccgctcaggcggcgggcgatatgcggcgccaccagcgcgataaatgagatcggcccggccagcgccgtcgaggcggcggtgagcaccactgccaccagcatcagcagcaggcgcgaacgctcgacctgtacccccagcgcgcaggcggtatcgtcgcccatctccagcagtcgcatccggcgaaccagcagggcgctgcccaccagcatcaacaggatcagcggcgccgacggccaggttttaccccaggtcaggccgttaagcgatccggcgttccacaggcccgcagaaagggcggtctccagcgaggcgcgcagcagcagccaggtgttgaatgccaccagcatggcgcgcacgccgatgccgataatgatcaggcggaaggtttcgatcccgttgcgccaggccagcagccagaccaccagcgaggtcagcaccccgccggccatcgccgccagggcgatcgccgtcaggttctggccgaagaggaccattgccaccagcacgccgctccaggcgccggtgttaaagcccatcacgtccgggctgccgagcgggttacgggtcagcgactggaaaatggcgccgctgacgccgagcgcggcgccaatgagcagcgccattaacacccgcggcagccgccattcgttcaccaccatcgcgacgttgcgcggcgcatcgccgaacagcgccgagaacacctggtcaatcgtcaggggcaccgggccttgcgccagcccgagcagggaaatcagcaggctggcggccattagcagcagacagctggctatcaggcggcgggacggggcaatcacagggcacctccccgcggctggcggcgcaccagccagatcagcaccggcgcgccgagaaaggcgctcaccaccgatacccgcagttcgccgggcaccagcaggcggccaatcacgtcggcaaacagcagcagggccggggtggcgagcagggtgaccggcagcgaccagcgatgatcggcccccaccagccagcgcgccatatgcggcatcatcaggccgataaaggcgatggggccgacgacggcggtggcgctgccgcacaggacggtgatgacgattaggccgatcagctgggtgcgggcgacgcggctgccgagggcggtggcggtatcgttgcccaggctcaggctgttcagcgcccggctcagcagcagagcggcgatccccgccacgactaccggcagcaggacaattttcagcgtttgcagggtgcggatatccagcgaaccggcctgccagaagcgtagctgatcgtagacgtccgggttgagcagggcgatgccgttggacagcccctcgagtaccgccgcaagggcgaccccggcgagagtgaggcgcaccgggctcagctgaccgccgccctggctgccggtaaaggctaccagcagcgaggcgcagagcgcgccgcagaatgccagcagcagctgctcctgcggggaagtgatcccaaacagcgccgcgccgaggacgatggcgaagctggcgccggagttgacccccagcaggccggggtcggccagcgggttgcgggtgagcgtctgcatcagcgcgccggcgaggccgagggcgacgccggccagcagaccggccagagtgcgcggcaggcgcgcgtccagcacgatagtgcaatcagcgctttgacaggttccgctgaaggcggtgaataccgtgccgatcggcaacgatttggcgccgatggtcaggctaagcgcggcggctaaggcgagtaatagcaacaatccgggcacggcgacagagcgtaccgcggtcgtagaaaacgacataactgacatccctgatatgataatgatagtaattatcgttatcgattttattcagctatggtagcatgacccacagtaaaaagggtattaaaaataacgacaaggcgctgtaatgaaccgacaatcctggctgctcaatctcagcctgctgaaaactcacccggcgtttcgcgccgtttttatcgctcgctttatctctattctgtcgcttggcctgctgggcgtggccattccggtgcagatccagatgatgacccattcgacctggcaggtcgggctgtcggtgacgctgaccggggcgtcgatgtttgttggtctgatggtggggggcgtgctggctgaccgctatgaacgtaaacgcctgatcctgctggcgcgcggcacctgcggcgtgggctttgtcggcctgtgtctgaacgccctgttgccggagccgtcgctggcggcgatctacctgctggggatctgggacgggttcttcgcctcgttgggggtgaccgcgctgctggcggcgaccccggcgctggtgggacgggaaaacctgatgcaggccggggccatcactatgttgacggtgcgcctgggctcggtgatttcgccgatgatcggcggcctgctgctggccaccggcggcgtggcctggaacttcggcctggcggcggcggggacctttatcaccaccttaaccctgctgcgtctgccgcagctgccgccgcctccgcagccgcgcgagcatccgctgcgctccctgctggcggggctgaccttcctctgccggagcccgcttatcggcgggattgcgctgcttggcggtctgctgaccatggccagcgcggtgcgggtgctctatccggcgctggccggtagctggcagatgtcggccggacagattggcctgttgtacgccgctattccgctcggtgcggcgctgggggcgttgaccagcggccagctggcccagacggtgcggccgggcgcgctgatgctggcgaccacggtgggatcgtttgtcgccattgcgctgttcagcctgatgccgcactgggcgttgggcgcgctgtgcctggcgctgtttggctggctgagcgctattagctcgctgctgcagtacaccctgatccagacccagacgccggaacatatgctcgggcggattaacggtctgtggaccgcgcaaaacgtcaccggcgacgccatcggcgcggcgctgctcggcggcttaggggcggtgatgacgccggcggcatccgccagcgccagcggctgggcgctggcgcttgtcggtgtgctgctggttgggctgctacgcgagctgcgccgtttccagcgcccggaaattgtcaacgaaagttaagtagggtgcgcttgcccggtggcggctgcgccttaccgggcctggggtacggcaggccggtgcaagctcagtaggccgggcaagcgcagcgccgcccggcaaggtgtgcaggccgagtgcccggcctgatggcgcagcccgcgttagccgaacaggctggagagacgctggagcaccagcagagcgctgtagtagtcaaggcggaaggtctcggtgcccagcgggtagacgcgtttgcctgcgaccgccgggagatgcgccagcagcgggttggcgtagatggcatccgcatctttctggtcgccggcgaacaggaacagactctggccgttcagaccggccgcgaggttctccccgcccagctgcacgatatcgtggcgtttaccctggctatggctggcgggcaggccgcccggcagcgtcgccaggctaaagcccagctgttcgagcatctgcccctgagccgattccggcgtccagatattggcgctgtgcgcggcggcggtatagaccagggcggtcaccggctgcggcggcagtttcattttttcttttaacgaaacgagctgtttattgaagtcggcaatgcgcgcgctggcctgttgttcatgaccggtgatctgccccagctgggtgagcagggtttgccagcttttatcgtcatagttgatgaccagcgtcggggcgatggttttaagctgatcgtacagcggcagggcggagtcgccaccggtcgcgctcaccaggatcagatccggcatctgggcggccaccgcttcggcgcttggttcgccgatgtacagccgcgccagcttgcgggctttggcaacctcgctccactggcgcagaaagccctggctatcggcgacgcggttgttcggcgtggtcgcgccgctggcgaccaccggagcgtcaatcgccagcagcgaaccggtaagcgtcacgctggtggagacaatgcgcagcggctgactcggcagggtatgcgtcccgtagctgtcggtgacctggcgcggccagtccgccgcctgggctgaggtaattcctaaaagcaacagcatgccggtcagcgcaccgcggcggcagaaagaaaagaagttcacgtcatcgcatcctgatttgaaaggtgataaatgcgtctcattttcaactttgtgtcaacaggatgcaagccaaagtggcggcgccatgacgtaacgcggttgacatggcgggcaataccttttaggttagccaaccaaaatataaatgataattattcttaatatctttatcgtttttggaggatgatatggaaacgtcactggctgaggatgtaaagaaaccgacccggaccctgtcgccggacagcttcttctttatgtcgccgtaccgcagttttaccacttcaggctgcttccgtcgcttctcacagcccgccgttggcggcgatgcgctgaacggcgagttccagcagcagatggcggccgcctttgccgaggcccgggcggcggggatccgcaagccggtgatggtcggggctatcccgttcgacacctgtcagccttccgagctctatatccccgagcgctgggaagcgttctctcgcccggaaaagcagcgttccgcccgctatgccgcgccgctggaggcgatggaggtggtggagcgtcgggagatcccggagcaggacgcgtttttagccatggtggaacgcgccgccgcgctgaccgccaccccggaagtcgacaaagtggtgctatcaaggcttatcgatattaccacccgcgaccgcgtcgacagcggcgcgctgatggagcgactgatcgcccagaaccccgccagctttaacttccacgtgccgctctccgacggcggcgtgctgctgggcgccagcccggagctgctgctgcgtaaagaaggacagcacttcagctctctgccgctggccggctccgcccgtcgccagccggacgatgtgctggaccgggaagcaggcaacaggctgttggcctccggcaaagatcgccacgagcacgagctggtgacccaggcgatgaagagcgtgctgggcccgcgcagcagtcagctgtcgctaccggagtcgccgcagctgattaccaccccgacgctctggcatctggcgacgccgatcgcaggcaccgcgctggcggaagaaaacgccatgtcgctggcctgtctgctgcacccgacgccggcgctgagcggtttcccgcatcaggcggcgaagcgcctgattgctgaactggaacccttcgatcgccagctgttcggcggcatcgtcggctggtgcgatgacgaaggcaacggcgagtgggtggtgactatccgctgcgcgcgtctgcagcagcgtacgctgcgcctgtttgccggcgcgggcattgttccggcctcctcgccgctgggcgaatggcgcgaaaccggcgtcaaactgaccaccatgcttaacgtatttggcttgaactaagaggcaaggatgattgcatttacccgttggccggaagagtttgcggcccgctatcgtcaaaaaggctactggcaggatctgccgttaaccaatctgatcacccgtcacgcggacaatgacgccgtggcgattatcgatggcgagcggcagattagctaccgccagtttaaccagctggtggacaacctcgcctgctcgctgcagcgccagggactgaagcgcggggagaccgcgctggtgcagctgggcaatgtcgccgagttttacatgaccttctttgcgctgctgcgcatcggcgtcgcgccagtgaacgctttgttcaaccaccagcgcagcgaacttaacgcctacgccgcgcagattaaaccggcgctgctgattgccgatcgcgagcacgctctgtttgctgacgatagctttctccacgcgtttatcgcggaacatccttccctgcgcgtcgcactgttgcgtaacgacggcggcgagcgcgatctggcgacggagattaaccgcccggcggataactttatcgccaatccaacccctgccgacgaagtggcctttttccagctctccggcggcagcaccgggacgccgaagcttatccctcgcacccataacgattacgactacagcatccgccgcagcaacgagatctgcgggattaacgctgaaacgcgctacctcaacgcgctgccggcggcgcataactatgcgatgagttccccgggttcgctcggcgtcttcctcgccggcgggcgggtgatcctcgccgctgacccgagcgccacgctctgtttcccgctgatcgaaaaacatcagattaacgtcgcgtcgctggtgccgccggcggtcagcctgtggctgcaggcgattcacgaatggggcagcaacgcccagctgcaatcgctgcagctgctgcaggtcggcggcgcgcgcctgtcagcgaccctcgccgcgcgcattccggcggaaatcggctgccagctgcagcaggtgttcggcatggcggaggggctggtgaattacacccgccttaacgatagcccggagcggatcatcaatacccagggctgtccgatgtgcccggacgatgaagtgtgggtagcggatgccgacggcaacccgctgccgcgcggcgaagtgggccgcctgatgacccgcgggccgtacactttccgcggctactacaacagcccgcagcataacgcggaagcctttgacgccgaggggttttattgctccggcgatctgatttcgatcgacgaagatgggtatatcaccgtccagggccgggaaaaagatcagatcaaccgcggcggcgagaagatcgccgctgaagagatcgaaaacctgctgctgcgccatgaggcggtgatccacgccgcgctggtcagcatcgaagacaatctgctgggcgagaaaagctgcgcttatctggtggtgacctcgccgctgcgcgccgtcgccgtgcgccgcttcctgcgcgagcagggggtggcggaatttaaactgccggaccgcgtggagtgcgttgccgcgctgccgctgacgccggtgggcaaagtcgataaaaaacaattacgtcagtggctggccgaaggcaagctgggctgaaggagaacagagaatggcaatccctaaattacaggcatatgcgctgccggaagccagcgatatcccggcgaacaaggtcaactgggcctttgagccgtcgcgcgccgcgctgctgatccacgatatgcaggaatatttcctcaacttctggggcgaaaacagcgcgatgatggagaaagtggtggctaatatcgccgccctgcgcgacttctgcaaacagaacggcattccggtgtactacaccgcccagccgaaagagcagagcgatgaagaccgcgccctgctgaatgatatgtgggggccgggtctgacccgctcgccggagcagcagcaggtgattgccgcgctggcgccggatgaagacgataccgtgctggtgaaatggcgctacagcgcgtttcatcgctcgccgctggaggagatgctgaaagagaccggtcgcgaccagctgataatcaccggcgtttacgcccatatcggctgcatgaccaccgccaccgatgctttcatgcgcgatatcaaaccgttctttgtcgccgacgcgctggcagatttcagccgtgaagagcacctgatggcgctgaaatacgtcgctggccgctccggccgcgtggtgatgaccgaagagctgctgccgctgccggcctccaaagcggcgctgcgcgcgctgatcctgccgctgctcgacgaatccgacgaaccgctggatgatgaaaatctgatcgactacggtctggattcggtgcggatgatggccctggccgcccgctggcgcaaagtgcacggcgatatcgacttcgtgatgctggcgaagaacccgaccatcgacgcctggtgggcgctgctctcccgtgaggtgaaataatggcggcgctggatttccacggtcagaccgtgtgggtgaccggcgcaggtaaagggattggctatgccaccgcgctggctttcgtcgaggccggggccaacgttaccggtttcgaccttgcctttgacggcgaaggttatccgtttgccaccgaaacgctggacgtcgccgatgccggtcaggtacgcgacgtgtgcgcgcggctgctcaacaacatcgaacgactggacgtgctggtgaacgccgccgggatcctgcgcatgggcgccaccgaccagctgagcgcggaagactggcagcaaaccttcgcggtcaacgttggcggcgcgtttaatctgtttcagcagacgatggcccagttccgccgtcagcggggcggggcgatcgtcaccgtcgcctccgatgccgcgcatacgccgcgtatcggcatgagcgcctatggcgcctcgaaagcggcgctgaaaagcctggcgttaaccgttggccttgagctggcaggcagcggcgtgcgctgcaacctcgtgtcgccgggctccaccgacaccgatatgcagcgcaccctgtgggtcagcgacgatgccgagcagcagcggatccgcggcttcggcgagcagtttaagctcggcatcccgctgggcaaaatcgcccgcccgcaggagatcgccaataccattctgttcctcgcctcttctcacgccagccatattacgctgcaggatattgtggtcgatggcggctcgacgctgggggcgtaaatggcctggaagcgagagctcacgctggcggcgctgaacgccagcagcgaaaacaccatggtggcgcatcttggcatcatctacacccgactggaagcggggctgctggaggcggagatgccggtggatgcgcgcacccatcagccgtttggtctgctgcacggcggcgcctccgcggcgctggcggagacgctgggctcgatggccggttggctgatgaccgaagaagggcagtgcgtggtgggcaccgagcttaacgctacccaccatcgtccggtctccagcgggaaagtgcgcggcgaatgccgaccgctgcatcttggccgccagagccagagctgggagatagtggtgtatgacgagaaggggcggcgctgctgcacctgtcgtctgggcaccgcggtgctgggctaagaagccgctatttccccggcttgcgctacgcttatccgggctacgtatagtagcccggataaggcgcagcgcgccgccatccgggaatttccctgctcgcgctgcgcttagcagggctacggtttatggaccaggaagctgctatttccccggcttgcgctacgcttagccgggctacgtatcggcgcaatgggtagccgggataaggcgcagcgcgccgccatccgggaatttccctgctcgcgctgcgcttagcagggctacggtttctggaccaggaagccgctgtttccccggcttgcgctacgcttagccgggctacgtatcggcgcaatgggtagccgggataaggcgcagcgcgccgccatccgggaatttccctgctcgcgctgcgcttagcagggctacggtttctggaccaggaagccgctgtttccccggcttgcgctacgcttagccgggctacgtatcggcgcaatgggtagcccggataaggcgcagcgcgccgccatccgggaatttccctgctcgcgctgcgcttagcagggctacggtttctggaccaggaagctgctatttccccggcttgcgctacgcttagccgggctacgtatcggcgcaatgggtagccgggataaggcgcagcgcgccgccatccgggaatttccctgctcgcgctgcgcttagcagggctacggtttctgggccaggaagccgctgtttccccggcttgcgctacgcttagccgggctacgtatcggcgcaatgggtagcccggataaggcgcagcgcgccgccatccgggaatttccctgctcgcgctgtacttagcagggctacggtttctgggctgaggagccgctatttccccggcttgcgctacgcttggccgggctacgtatcggcgcaatgggtagcccggataaggcgcagcgcgccgccatccgggaatttccctgctcgcgctgtacttagcagggctacggtttctgggctgaggagccgctatttccccggcttgcgctgcgcttggccgggctacggatctgtaggtcgggtaaggcgttagccgccacccgacaaacaaacggcaccgttcacggtaatcctttcattcattttcctgccttaagtgatctcgctagcaatgtgagacaaatctctgtgggtgtacggcatctgcgctgtttcgatgttgttaaattctgcgttgtgatctagaaacaaaatgtaacatcctgattaccctaccggtggaccacaacaatgaataattcagggaaataccttatctggacactgctctccgtgatcggagcctttgccctcggctatatcgccttaaaccggggtgagcagataaatgcgctgtggattgtcgtcgcggcggtctgcgtttatctgatcgcatatcgtttctacggtctgtatatcgccaaaaccgttctcggcgttgacccgacgcggatgacgccggcggtacgacataatgacggcctcgattatgttccgaccgacaaaaaagtgctgttcggtcaccattttgccgccattgccggcgcggggccgctggtgggcccggtgcttgccgcgcagatgggctacctgccggggatgatctggatcctcgccggcgtggtgctggccggcgccgtacaggactttatggtgctgtttgtttcgacccgtcgcgatggccgctcgcttggcgaactggttaaagaggagatggggccaaccgctggcgtcctggcgctggtggcctgctttatgatcatggtcatcatcctcgcggtcctggcgatgatcgtggtgaaagcgttgacccacagtccgtgggggacatacaccgtcgcctttaccatcccgctggcgatctttatgggtatctatattcgctacctgcgcccggggcgcatcggcgaggtgtcggtgatcggcctggtgatgctggtgttcgccatcatctccggcggttgggtggcggaaagcccgacctgggcgccgtggtttgattacaccggcgtacagctgacctggatcctggtgggctacggctttgtcgccgcggtactgccggtctggctgctgctggccccgcgcgactacctctccaccttcctgaaaattggcaccattgttgggctggcgattggcattctgattatgcgcccgaccctgaccatgccggcgctgaccaagttcgtcgacggtaccggcccggtgtggagcggcaacctgttccccttcctgtttatcaccatcgcctgcggcgcggtctccggcttccacgcgctgatctcctccggcaccacgccgaaaatgttggccaacgaaggccaggcctgctttatcggctacggtggtatgttgatggaatccttcgtcgccattatggcgctggtggcggcctgtattatcgacccgggcgtctacttcgcgatgaacagcccgatggcggtgctggcgccggcgggaaccaccgatgtggtcgcctcggcggcgcaggtggtgagcggctggggctttagcattaccccggatacgctgcatcaaatcgccagcgaggtcggcgaacagtcgattatctcccgcgccggcggcgcgccaaccctggcggtggggatggcctacatcctgcacggctcgctgggcgggctgatggatgtctcgttctggtaccacttcgccattctgtttgaggcgctgtttatcctgacggcggttgatgccggcacccgtgcggcgcgctttatgctgcaggatctgctgggcgtgattagcccggggctgaaaaaaaccagttcgctgccggccaacctgctggcgaccgcgctgtgcgtcctggcgtggggctacttcctgcatcagggggtagtggatccgctgggcgggattaacaccctgtggccgctgttcggtatcgccaaccagatgctggcggggatggcgctgatgctctgcgcggtggtcctgttcaagatgaaacgccagcgctacgcgtgggtggcgctgctgccgacaagctggctgctgatctgtaccctgaccgccggctggcagaagtcgttcagcccggacaccaaagtgggtttcctggccatcgctaataaattccaggcgatgatcgacagcggcaacattccgccgcaatataccgaatcacagctggcgcagctggtgtttaacaaccgtctcgatgccgggctgaccatcttctttatgattgtggtggtggtgctggcgctgttctcgattaaaaccgcgctggcggcgctgaaagaggataaaccgacggcgaaagagacgccgtatgagcctatgcctgaaaacctggacgcgattgatacccaggcgaaaggggcgcattaaccggtgtgccgggtggcggcttcgccttacccggcctacatttccgatcctccttctccctttgggagagggaaacaaaagagaaatgacttatgttcgacaccctctccaaagcgggaaaatatttaggccagacggcgaagatgatgatcggcgtgccggattacgataactacgtcgagcacatgcgaataacccacccggatcagacgccgatgacctatgaagaattctttcgcgagcgccaggacgcgcgctacggcggcaagggcggggcgaagtgctgttaaccctctttcggcagatagaggctgatctgctcctgggtacagccgtaaatcgccgccagcttctcgcgggtgcgcttctgcggacgggagtccagcgcttccagctgcgacacggcggactggctgatgccgagtttagccgcgacctcctgctgggatagcccgcgcaggatgcgccacgcggcctgcagactgacgttttctttatgcatcacgtcgcatacttcgcctggtagcatgacattatcatagatgtctgattcataaggaatatcttcccagtcgctttcatcctcgtcgtcgtactccagcagagccaggcgcatacgaaagtaatcgctgtaaggaatgacgacatactggtcttttccttcttcatccttgatgtactgaatagtcatattcggtatcttcctcatgaaggtaggtggtggtggttcggcgtttaaccgccacgacgtagcaggtatcgcccggcggatccccaaaggtgtagatgactctgtaatcacctaatcgcagccggtagtggttttcgggagaggacaattttttgatatccgagatagatgaagctttatcatccatcttctccagcctggatttaatgcggctcttataccgattatcgattttggaaaatggcttatctgccgtttttgaccagacaatcttcatccgtacctccactgtacgcccacacaaaatataaggaaataataagactattagataaattccgaatttcttatggggtactgtagagcggagaaaaaacgcaggtaagaggcaaaacgcaacccgtcgaggcggcgcgggaaggcctctgtcgggcgacagaggcttgcagaaaatgtgcgatcaggcgttcaatccgccatccacgtccagccccgtaccggagatctgcccggctgccgggctggcgaggaaggtgaccgccgcggcgatgtcttccggctggccgtagtgaccgaccgcaatcatctggcgctgggcttccgcctgttctccgtcttccgggttcatatcgctgttggtcggccctggatggacaaggttaacggtgatcccgcgagggcctaaatcacgcgccaggccacgggtcagggcgttgagggcggacttggtcatggcgtaaaccgcgatgcccggcatggccacgcgattagccagacagctgccgatgttgatgatccgtccgccatcggccatatgcaccagcgcttcctgggtggcgatgaccaccccacgaatattgacgttgataagggcgtcaatgtccgccagcgtcatggattccagtggaccgccgcgggcgatcccggcgttgttgaccaaaatatccagcccgccgagggaccgggccgcatgggttaccgcctcctgaatagcctgcgcgctggcgctgtcggcctgcaccgcctcgccgtgccgacccagggcctttatttcatcggcgactgcctgggctttatcggccgatttttcatacgtaataaccacatcggcaccggcgcgtgccagcgacagcgcgattgcgcgacccagcccacggctggcgccggtaaccagcgcctttttacctgttaaatcgatctgcatgatgacctcgttgcgagagtggtgagcatcatcattaggtatagacggtcggggcgattaacggctgaagtattccaccttctcaaacgccgcgcgcagaacctcaggggttaacgtcactggtaaatagtgaatcgactcgcccgggcgcagggtatgggcaatgacccggtccagttctgtgcggttattgatatcgacctccagtgccgccagggtggtcggcaggttaaagcgctgatacgcctgcactaactgcgccagcacatcgtcctgagcaagcagggcgctctgtaccagaatgccgtaggcgactttggtaccgtggaggaatttatccgtctgcggcagcaccgtcagtccgttgtgcaccgcatgggcggcggcgacccgggtgtaacgttcccccagcccgccaaccatcccgccgccggcgataatcgcctccaccacatcgcgaaacgcctgggtcagatcgccgcggcgctggtccgccagcgccgtttcgctgctggccagcagcatgtcgcggatcgccagcgcgccgttaatccccagccgcacggtgagcggcagcgcctccggttgcggcgccagcaccactgcctcataccatttggctaaggtgtcgccaatgcccgccagcaggtactccgccggggcgttgagaatgatgcgcggctcgaccagcaccaggaagttggcgtcatcgaagatctcaaaattcagggcctgtccggcgtcgctgtaccacaccgacagcggcgtccacgccgcgcaggtggcggcgatggtcgggatggccaccagcggtacccccaggcggcgggccagcactttcgcgctgtcgagcagcgcgccgccgccgacgccaatcactaccgcccgatcgtcaccggaggcctgcaccagcgccgccacgtcgcgttcgctgcagtggccggtaaagcggatcttttttgcctccggcaggtggaaggccgccggcagaaaaggttcggcgccggccagggcgcgctcgccatagacccacaccgcccgcgagagctggtcggcgctgaaaaaatcgctcagccgctcaaggctgccagggtgggagaaatagttggccgggccgggtacgacgcggatatcgctgttgctcatggaagctgtccttataggtgttgggctaaactgatgttatgtctggacatccagatggctaatattatttcgttgtatcttatgctttttacgcagttgtcagccagcggcggctatgaaaaattcgttaaatcagaagattaattaccgcacgggaacagtgatgagcgcgaaccgccttgagatgcataacattagcctggccttctccggctttcaggcactgaacaaggtggactttacccttcatggcgggtcggtgcatgccctgaccggggccaacggcgcgggtaagtcgacgctgatggccgtgctgtgcgggacgcatgctcactatcagggcgaggtgacgatcaacgatcagccggtcaccattcgttcgccgcgggatgctaaacagttggggatccacctggtgcagcaggaggtggatgtggcgctggtacctggcctgagcattgcggaaaacatcatgctggacaggctggcagagccgggcatggcgtttcgctggtcgcgggttcggcagctggcgcgcgaggcgctggcgcagctggacgtggcgctggacgtcaggcgctccattgacagctgcacgctcgccgaaaaacagcaaatcctgctggctcgcgctctgtcgcaccattgccgctttttgatcctcgatgagcccaccgcgccgctggatcagcatgaaagtgagcgcctgttttcggtagtacgccgtctgcagcagcaggggatcggggtggtgtttatttcgcatcgtatccatgaactgaaggcgatctgcgacaccctgacggtgctgcgcgacgggcggctaattgagagcggcccgatggcgccgctgagcggcgaacagatcgtcgaaaagatgctgggccacgagctgagcgatatcttcccaccgccgcgcccgccgcacggcgaagaggtgctgctgcaggttgacggtctgcatgatgaggcgttgctgcaggatatttcgctgcgcctgcggaagggggaaattctgggtatcgccgggctggccggcgcgggcaaaaccgagctgtgcaaagcgctgttcggcgccagcaaaagccgggtgcagaggggcgagctgaacggccagccgtggcgaccgcgcgatccggccgactcggtggggcgcggcctggcgctggtcccggaggagcgacgcaaagagggcattttcattgaagagccgatcgcgatgaacctggcggtcagcgccgataacagcttttcgcgctggagcctgtttggccatcggcaggcctggcgctgggcggaggaggtgattgcccgcctcggcgtgcgcgctaccggtcccggtcagacgctgcgccgtctttctggcggcaaccagcagaaggtggccattggcaaatggctgcgcggtgatgccaacgttttgatttttgacgaaccgaccaaaggggtcgatgtgaaagcgaaaaccgatctgttcatgctgatcgatggtctggcgcgggaaggcaaaggggtgatttatgcctcgggtgaattcgccgagctggtcggtttatgcgaccgcatctgcgtactgtgggacggacggatcgtagcggagatccccggcgcggaagcccgggaagagacactgctttattattcaaccggaggagcggcagcgtgagcaaggccctggcagtaaacgcgacggtatcgggccgtcagcgattttttgattttctctataagtggggcatgttgctgaccgtggtgctgctggtggcggtctttggcctcgcctcggacaacttccttgacccgttcaacatcatcaacattctgcgctcgattgccatcgtgacggtgattgccattggggtgtcgatttccctcaccatcggcggcttcgatctgtccgtcggatcgacggcatcgctggctaacgcgctggtgatttccctgtttgtctggcatggcctggggaccaccgaagcgattctgataaccctcgcgctctgcaccctggtggggctgtttaacgcctttctgatcgtggtgctgcgcattcctgacatgctcgccaccctggccagcctgtttgtgattcagggcgtggcaatgacatacagctacggtgggtcgattaccgaaaacatggtgctgccgagcggcgagatggcggagggtactatcccggcggcctttggcgcgctggggcaggtgccgaccatcgtcattatcatgctggtggtgacgctggtcgcccagctggcgctgtcgttcactacccacggacggcggatgtacgccatcggcggcaacccggaggccgcgcggctctccggcctgcggatcacgcgttacaaagtcgcagcatacgtgattgcctcgctgctggccgggctgggcggcattctgctggcctcgcgtatcggatcctcgcaggtcaacgccggcggcggctatctgatggacgcggtggcggcggcctggatcggcttttcgctggcgggctccggtaaaccgaacgccctggggacgctggtgggggcggtgatcctcggcgtgctctccaacgggctggtgatgctctcggtgccgtattacgcgatggacattattaaagggttggtgctggctggcgcgctggcactgacctattttcagcgccgtacttaacattttacagggtaaaccgcatgaaaaagatcgcactctctctgatgacgctgggtctgctgcagtcgacggcggcgctggccactgccccgacgccggtgccggcggcgattgccgagcacagcggcccgatccgtattgcggtgatccgcaacctggggtctgacgataacaccacccagtttgtctccggggcgctgcaggaaggcaaaaagctcggtttcaaaatcagcaccttcctgagcaacggcgatgacgccaaattccaggacttcgtcaaccaggccatcagccagaaatacgatggcattattctctcccaggggcgtgacccgtattccaccgcccttgtgaagaaggcggtggacgccgggatcaaagtggcggtgttcgataccgcggtgagcggtgagatccccggggtgacggtcagtcagcaggatgacgcgtcgctgaccgagctctcttttggccagctggtgaaagacttcaacggcaaggccaacatcgtcaagctgtgggtggcgggcttcccgccgatggagcgccgtcaggcggcttaccagacgctgctgaagcaaaatccggggattaaagagctggagtcgatcggcgccgtgtcatccgatgtgcagggcgacaccgccaacaaggtgggggcgatcctcgccaagtatccgaaagggaaaattgacgcgatctggggcacctgggatgcctttagccagggggcttataaggcgctgaaagagaacggccgcaccgagatcaaactctacagcattgatatttccaaccaggatctgcagctgatgcgcgaggccggcagcccgtggaaggtgagcgtggcggtggatccgaagcttatcggcgcgaccaacgtgcggctgatcgccaacaagatcgccggcgagccgacgccagccacctacgacttcaaggcggcagcgatcccgcaggcgctgctggcggcccagccgggggcggtgaacgtggcgtcgctggggaaaattatccctggctggggccagaccgaagactttatcgcgccgtggttcgcgacgctggaagcgaagaacaaataaaatcaagccgggtggcggtgggtggcggcctggtgccctcgccccggccctctccgcagggagagggggaaaaccataccaccgggcgagagggatcccctatgtcagcattaccttcccccgaatacagccgcaatatgcggctgattggccatagcgatcagggcggtcgtccggacggcgtgcagctgatggtgcaccgcggattcgcctatatcggccatatggtgtcgcagggcttttccgtggtcgatgttcgcgatccgacccggcccaccaccgtcaactatattgccgcgccgccgggcacctggaacgtgcacctccaggcgcatgacgatctgctgctggtgatcaacgcccgggatctgtttgccgacgcccgttttgctgatgagaaggtgtactacacccgctcggtgggcgacacggtcagcgatgtgcaggacaggggctggagcgccgggctgcgcatatttgatatttccactcccgcgcagccgcgggaaatcagtttcctgtcgcttaacggcatcggtattcaccgcatctggtacgtcggcgggcgctgggcgtatgtgtccgcgctgatcgacggttttaccgactacatcttcctgaccatcgatctggccgatccgcgtaagcccgaagtagccgggcgctggtggctgccggggatgcaccaggcgggcggtgaaacaccggactggccgcagggcaaacgctatgcgctgcatcacgccattattgccggggataccgcctacggcagctggcgcgacggcggcctgacgctgctggatgtcaaagaccgtacccagccgaggctgattagccatcgcaactggagcccgccgttcggcggcggaacgcataccgcgctgccgctgccggatcgtgacctgctggtggtgctcgacgaagcggtgctcgacaatcaggaggacggtgagaagctgatctggctgtttgatatccgcgagccaaccaacccggtgagcatcgccaccttcccgccgccggatgaagcggattacgtggcgaaaggggcgcatttcggcccgcataacctacatgagaatcgtcccggcagctttgtcagctcaacgctgatttttgccacgtatcagaatgccggcgtgcgggcttacgatatttccaacccgtatcgcccgctggagaccggggcgctggtgccggctgcgcctgagagaatgatggatacccgtcccggccgcccgcgggtgatccagtcctgtgacgtgtttgtcgatgcgcaaggcattatctacagcaccgattacaacggcgggctatcggtgattgagtatctggggtgagggtaaggtaaacgcaaaattgtaatcgcatgtctgccgggtggcggctttcgccttacccggcctacgaaagactgcaagatcaaaccgttatgcggctatttgtaggcccggcaagcgcagcgccgccgggcaatcccagaaaatagcacttttttaggggttgctccctctccctgtgggagagggttggggtgagggaaacaggcgcactcagctgtactggcgtacccgcgccagcagctcgtcgacgctgtcgatacgctcggccagcacgatcagcgctctgcccagggtaatggcgtggcgcaggcactcatgacgcatggcgtcgtcctggatagtgtcgatatccgcgacgtgcgacagtccgacgctgcggcggatcagttcgctgccgcagaagccgaccgcgtccgcccacacctttttcagaaaggcggaggcgtagccggggtaagccagcgccgcgtcgcgggttttctccgccgccagcgcctggaagcgctcggcaaaggtggtccacagctggtggatgtcgttcagccgctgctcgcgcgcggcggcggcatcgcgaatgccgagctggcccggcaggccgcagtagttcagcagcaggttgccgatggcggtgccgatatcgaagccaatggggccgaagtagccgaactcggcgtcgatggccttcaggctgccttcggcaacgaagatcgacccgctgtggatatcgccgtgcagcagcgcttccgcatgggcaaagaaacggtgcttcagcgccgccaccgccagcttaagctgggcgtcgtcgcgcagggcggcgacatcggcctccagctccgccgggtagttattgcgctcgtggatctgatacgggtcgttaaagaacagatcctcggtgatctcgcacatcgccgggttaataaactgcgccacctgcgcctttttctcgtggggatggaggtagaaatcgctggtgtgaaacagcacctgcgccagatagtcgccaagctggcgggccgcctggggatagtagacgttagcgataagctctccgcgccagatgcggtggtcggaaagatcttccatcaccatcaccgccagctcgggatcaaagtgatggatttttaccgtgtgctgcgggctgtgctgatagtgggcgaccagggtctgcgcttcgagacgggcgcggtcgagggtcagcggccaggattcgccgacgcagcgcacgtagggcagggcctgtttgacgatcgcccggctgacgccctgacgatcgaacactttaaacaccagattgaggttgccatcgcccacttcctgcgcgctgaccagctcagatgggttgtcgatgccggcgaactgttgcgcgtaagccacggcatcgtgggcggtgaaggtatggtattgcgacattgcctcgatcctcgaattctgattaagccgttcagacgtctatacttctggattccatcctgacacaatgtgatacaacaacgcaacagggatttaacgacatgcagacattacagaccaccagcctgcgggtgagtgaaaatcagctttttattctcgaccagcaggccttgccgcaggaaacacgctggctggcggcggataacgttgcgctgctggtggaccatattcataccctgcgggtgcgcggcgcgccgctgattggcctgtcagccagcctgctgctggctctgctggcccagcgcggcctgaaccgggatgcactccagcaggcgctggagacgctgcgcgcggcgcggccgacggcggtcaacctgatgaataatctggatcgcatgaagcaggcgctggcccgggaggattacccgcaggcgctggaagcggaagccttgcgtctggtcgaagaagataaacagctgtgcgcccgcatcgctgaggcgggcagtgcgctggtgaagcccggcagtcgactgctgacccactgcaacaccggtggcctggcgaccgccggggtagggaccgccctgggcgttatcgcgctggcgcaccggcagggaaaagtgaccaacgtatgggttgatgaaacccggccactgctgcagggcggtcgtttaaccgcctgggagctgggcgagctgggcgtgccctatcagctgatcgccgattcaatggccgccagcctgatggcgcaggggcaggtggatgcggtgtgggtcggcgccgaccgtatcgccgccaacggcgacgtggcgaataaaatcggcacctattctctggcggttttggcccattatcaccagatcccgttttacgtcgcggccccgcagaccaccctcgaccgctattgcccgaacggggcggccattcccattgagcagcgcgccgcggccgaagtgaccggagtggcgggcagctttggcgcggtacagtgggcgccgacgggggctgccgtttacaatccggcgttcgacgtcacgcctgctgggctgataagcggctgggtgctggacagcggggtggtcaccccggcgcaggtcgccgccggggcgtttgcgccggacaacggataacggacgtcgtgccgggcctggaaaaaaaggttttcccgggcccggacaaacaccgcgccgctacggcaggaccatggctaccgccggggcggatgatcggtcgatacgctgaccgagggcggtaatagccgcctggaagggacacagcgtaccgacgtcggtctgacggcagcccggctgatgccactcctgacgcagcatcgggtgctgcgcgtccggcgtctgcagacgacgcaggtcgtcgaggccctgggcctggaaatagacccgcagatagcgttctccgctcttcgcgttgcgccagcgctccagcaccaggctactgcccggcgggatatttccccggctgtagcccggcagctgccagctaaagttcatcagcgtgcgcaccatggcgatattggtgtcatgggccaccagcagcagccagcgtacgttcggattcgcctccggtttgacgccatcgagcatagcgttgagcagcaccgacccgcgtttttgcgcggtatacaacacatcgttactcagatcgtagttttccgttaacagcggcagcagggcggtgatctgcctggcctgggtgatcttgccccacgccagctggctgagaggcaggttttcactccagccgagacgcagcgtctccaccatattggccatcacgctcagtccgctaatggtggtcttcccacttttgctctgctcgacctgccacggggtatcgaagatcgggcaggacttatcggcctgacaaaccgcctgtttcaatagctggatggtcggcgccagcgcctgccgacgctgcgccagatccccggccttctctttcaccgccgccagctggcgggcggggtcggtttgcgtggcggcgaacttgtcggtctgaaacaggggatcggcatccccgctgacataatggatagcgacgccgcagccggggaaggcgccatccaccagcgcctgggcggtcgctcgcgtacgctgcagcgggctggcgcgcacgtatatcgactccgccgtcgggcatccggcctgcagcaggccgagctggcggtaatgctggccttccgcacgccctttgttgaccacggcggcatagccatggccggtgagctccccgtcatgggtggtccactcggtccacggtcggccggtggcggcctcgatggcttcccggttgccggccgtcggcggacgaataccgtggcggctgagctcgaccactttctccagctgccagtccgcggcggcggcagattgcagcgccagcagcggcagcgcgcaggcgataaacaggcgtaacagcccctgatgtcttgcaggcatcatatcttcttccttattcgttaatcggttatgaggagaacgaggtctgccgttcgacggcatggcgccgggcgacgatggcggcagtggtaaaacagagtagcgcggaacccagaccggtacccacccagaacagcgccaacgtgctgaaatcataaagcgttttgccgttttcaaggatagccgttttatcaataatgatcccggtgagaaactcgcccaggccggcgccggcgtagctggcgatgccgatggtgccgagcgcggccccggcggccttgcgcgaagagatatcgacggcgatcagcccgccaaggaagcaggtcagagcgccaatggtggccccgaagataatcatcgccagaatatcagtgtagtaattgtgcggcgaccagagcatcagggcgaagccggcggtgttcaacaggctgatgaatccggccatcacgctgcggttgcgcgggaaaaagcggtcggagagcatgccggcgatgatggtcccggcgatgccggcgatagcgttgacgccgataatcccggacgcctccagggtggaataagctttatcctgctcgagaaagaagatcccccaggagttgacggcgtagcggtcgatgtacataaaggcggaggcgagggcgagggtccacagcgccgggttgcgcagcgccagcagctggtttttaaacaccgagccgcgggcttcgacctcctcctgcggttcatcgcggatgacgttgatggacgggaagccgctgctctggggcgaatcgtgcatgaacagcaccagcagcaccacgccggcggcgccgagcgcggcggtggacaggtagcccatctgccagccaaacccggcgatcaccgcggcgatcaccatataggtcaccgcctcgccgatattatgcgccgtcgaccagatgccatagaaggtgccgcgctccttaacgccgtaccagcgcgccagcgagaccgcgcaggggccgacgcccatcgactgcgcccaaccgttgatcccccagaagatggccagcagcagggcgttggtggtcatccccatcatcaggttcatcccggcgctgagcaataaaccgaggctcatatagcgcaccacgttggcgtgatcggcgataaaaccattgaccagtttgccgatggcgtagctgaagaacagggtagagccgatcatgccgagctccgtcggggtgatccccagctccaccagcgcgcttttggcgacggtgaaggataaccggcagacgtaaaaggtgacgtaggccagggtcatggcgataaaggtttgccagcgcacccggcgaaaacggtgttcatcaaacgcggcgcccgctttcggcggcgacgcccggaaaaaagcgataattccagacataggtggttctccgcaggtcggaggcctgactgattgatgtggttcgtccgtgaatgaagttatcgttactgtgtagagtacataatcagaaatagcctgacccgtaagggttaatgtaatggttgtgggatcatctttttcagctgcgggtagagcgtctggctggccagcagcagcggattgccgcgctggatcccctcttgcgccagaaaatcgttgctggcgccgcccgcttcgcgcatcagcaccagccccggcagggcgtcccacgggttcatgtgcggctcgtagtagccaatcaaccggcccgccgccgcccaggcgctcatcaacgccccggagccgttgcggataaacatgcctccgtcgctgagcagcgcctgcagaaacggcagaaagtccgccggggtgacgcgatgcgaggtgccgacgcccatcacgccctctttgaccgtcgtcgcggggtgcggacggatcggagcgtcgttgagccaggcgccatggccccgcagggcgtgaaacagctcgcgatggttggggtcgtagaccacgccgatgaccggttcgccgtcggcgacgatcgccagcgacaggcaccaggtgtgcaggccgttgaggaaacagctggtgccatcgatggggtcgaccacccacagcactcgcgcgtcgggcaggcgagcgccgctctcttcgccgagaaaaccatcctccggaaacgcgctctgaatgcgctgtttgacaaaggcctccacccgcttatcggccacgctgaccacatcctgcaggtcgtcgcccttatggtcgacggtcaacgcctcgcgctgttgatagtattcaaacgccagctcagcccccgctttcgccagctcgcaggccagacggtagcgggcctgtagcgcttctgattcctgagattgcatagtgactccctattttgcacacgtgtgcattttgcgtgaaaaaaacagccccgaagggccgaatgagtgtggccgggtttcgcagaagattctgtgatcgctccagcataaaatgattttttcatttggcgctatgacgaataattagtttcaccggcacttcgcgatggcgcgagggcaggctgaagcgggcgatccgcgtcattaacaaatccaccgcgtggtgggccagcagggcggtattctgctgaacggtggtgagctgatagggctgccagtccgcctgcgggatatcgtcaaagccgacgatggccggcagcggggcggcggcgtcccgcaggccgtcctgggcgcccagcgccagcatatcggtggcgcaaaacagcgcctgcatcccggggttttcagcaaccaattctctggcagcctggtagccagcctgatagccgccgccgtcgcagaagcggctgctcaccgccatatccgacgtccgggcgataaaagcctcatagcgctggcgggtgctgaagttctcgcgattttcgccaataaagccaacctgccgccagcctcggcgactgaacagatccgccaccagcttcgctccctgggcgttatcgctgcacacccggtcgcagccggcgaggtccgcatggcggttgatcagggtgacggggatcttgcgcgccagatactcctccgccagcgacagcggcggcgcgccggaggtgatgatcaccccggcgacgtgatagctcagcagttgtttaagcgagggggcgagctgctgcggatcgtcagcgttcatcagcagcggcataaagccattgagcgccagctgatggaccagcggcgccagcagtttgctgcgaaacgggttgtcgaaaccggcggtgacgatgccgataaaattactgctgccggtgatcatcgtccgggcgatgatattcacctgatagcccagggcttccgcggcgctcagcaccttctgccgggtcttctccgacaccgaggcgccgggggtgaaggtgcgggagaccgccgagcgcgagacgccggccagtctggccacgtcctcggccttaatccattttttatcgctcatcgtcgtttcgcgccgtctgttttccaggaagccgacgcccgggcgggcgtcggtcacgcacactgcctgaaaaggtatcacagaaaggcgtcgtcgcgcagcgccttgcgccctatgccgggtagcggatgtgctccacctcacgctgcaaaatcaccttgccgtggcgaatggaggtcagcacccgtgcctgacgacggacggcctcgtagtcgttttccgcatcgaggatcagcaggttcgccgggcggccttcggcgaggccgtagttatcgcccagacacagcgcccgggcgctgttgtcggtgacaaagtcgagacagcgctgcagatcgtcatagccgagcatatggcagatgtgcagtccggcatccagaatgcgcaggatattgccgttccccagcgggtaccacggatcctgaatcgagtcctgggcaaagcagacattgatgccggcgcgatccagctccgccacccgggtgacgccgcgccgtttcggccagctgtcaaaccggccctgcagatgaatgctttcggtcgggcaggagatgaagttgatgcctgaggctttcagcaggcgaaacagcttcgagcagtaggcgttatcgtaagagcccatcgcgcaggtgtggctggcggtgacctgcgcccccatgccgcgcacccgcgcctcttccgccagcacttcgaggaaacgcgactgcggatcgtcgatttcatcgcagtggacatccaccaggcggccgtagcgctgggcgaggtccatcaaaaacatcaccgagctgacccctttgtcacgggtgttctcatagtgcggaatgccgcccaccacgtcggcgcccatctcgatggcgcgcgtcatcagctcccggccgttgggatacgattcgattccctcctgcggaaaggcgacaatctgcaaatcgatgagatcggcggcctcttgtttcaccgccagcagcgcctgcagggccgccagcgacgggtcggtgacatccacatgggtgcggacgtgctggaccccgaaatcgcgcagcatgccgatggttttcagcgcccgctggcgggtgtcctccggggtaatactcgctttgcgctggctccagcgggtgatgccttcaaacagggtgccgctgcggttccactccggctcacccgcggtgagggtggcgtcaagatggatatgcggctcgacgaagggcgggatcgccagccggccctgggcgtcgatagccccggcgtcggcagtctgcatcgcggcctgggcggtgatgcggtgaattatcccgtcctgcaggtcaagggtaaacagcgcctcctggcggcgcaggcgagcgttaataattttcatggtgggtcctgtaaatggttttgcgataaacgccagatcaccagcgcgaccgaggcgttgagatgaaactgagggtggctgaccgggtagccggtcagtttttcaatgcgctggatgcgctgatgcaacgtgttgcgatggagacccagccggtcggcggcccgcaccacgttgccgttctcctgcagcagcgtctcgagggtctccagcagcagccacggcgctttacggcccggctcgatcaggcagccgagggtgtcgtgcataaaatcgttgagcagcgccgggtcgctgaccgcggacagcagtttgataaaccccagctgctgatagtcgctgatgcgctgggttggccgcagggtatcgcacagatccagcgcctggcgcgcctgcgacagcgcccgcgggtaaccctgcagctgcctgaccggcgcggagaggccgcagagcagcgacaaactctcctctccgtccgccagcgcctgcagccactgctgtagccattttttctgctgaaagccttccccctcctcatccggcagcaggaaaaggaacatgttgctgcgctccagcagcggaaaggaattgccctgctggttgagctgctgctgcagctgctgacgcacgctgcggtgggcctgcagcagccaggcttcggcctgctcgggcgggaactggcgaaacaggcgggacaacccctccagacgcagcgccgccagccgcagcggacgggtaaaatcgagctgctggtgcagggcgcgctgatggagcatctgcaggtccggatagtcgccggtgaccagctgcatcagaatgtcgcgctgcgactgcaggacgttttcgctgcggaccagcgcggtgccgatgcgctcggtgacaatcaccatcttcagcaggtagggctgctcgatcagcggcatgcccagctcgtcggcaagggcgatcagcgtggcgggaatggcgtggatataggcctcgccggtgaggatcaccatcccggcgatgccgcgctgtttgccctccatcagcaactggatcaggttggcttcatcccggggatggttgatgccggtgataaacaccagctcgccgcccatgatccactcggcgatatgttcattttccgccacatagtaccagcgtacggcccgctgcagcccttgctttcccgcccgcagacgcagggcggagagtccctcaagggccagcagttcgctgaccgtcaggctcatggctcctgctccgcgacggcggcaggctggcgtttgcttagcagagtcagggcgatatagaccagcgcggaaacggagatccccaccagcggcgcgatccacggcgaaagataggccaccaccgcgccggcggcgtaggcgccgagtcccagccagttaaaacgcggcaggcgggcgttctgcagcaggggatagcgcccgccgcgggcgaaccagtagtcggcgaggatcaccccgccgatgggcggaataatactgcccagcagcacgaggaaggggatcagcatttcgtacatcccgccaatggccagcacaatgcccaccccggcggcggcgagggtcagcgtccggcgacgttcgctgcgcagcagatggcaggcggcggcggagacgttatagatggtggggccctggatggtcagcaggttgagacagagcatgatcaccgcggccaccgacagcccctgcaggatcagcacttcaacgatatcggcctgttgatagacgatagcgcaccaggcgccggcgacgatcatcagcccgttgccgatgaggaagctgcccatgctggcgagaatggcggtccggctggagttggccagccgggtccagtttgtcgcctgggtggcgccgctggcgaaagtgccgaagaccatggtgatggccgccgaccaggtcatggtgtcgctcggcgcaatacgggtcatcgcctgccagccgccggcgtggtgcagcgccagatacatggagaccatcagcagcacaaacatcaatggcaccgacaggcgcgacagcgcgtccagccccttgtagcccaccagcgcggtgacgcagaacagaataccaaacagcaccatcaacggctgggtcagcgcctcgggcagagcgaggatcttcaccagcgagatagcgaccgtggcggtgccccaggcgtaccagcccagctcggcaaagccaagaataaaatcggccagcttgctgccaatctccccgaagcagaagcggcccatcagcaccgtattcaggccgctgcgcgcggcgatccagcccagcgacgcggcatagagggccagcaaggcgttgccgatgacggctatccacagcagattgacgatggaaaaggagacgccgagtttaccgccggcgaacatcgtgccggtgaaaaaggtaaagctgaacaacaccatggcgatggaaaatacgcctttgcgtccggcggcgggcgcttcgacgaggggaaaatcattgctgtttgacatcctggaacctctggctggtagatgggcggtgatagccggaagtagcaagagatgtgccaggaaaaaccgggcacggggaatagcgcgcggtgtgcaacatgcacagttattgaaggatcccggaggggttatgccattctactgtgcatcctgccaggttttgcaccagtctagggcagaggagggcggtgagcgcatccctggcgccggaggagaattttagccaggacgatccgcctgtttttggccagagagtagtggagaatagtggtgtactgaaaatggttggttaaatcactgtgaataaaggttatttaatatgcttttatgatataaccatttgtcttgtgtgtgtttcctgaaatattgtcccctccggttagcggtgttagtatcggataaatagccatttagacggctaaataaatcatcgctaacctaaggaactgctatgtggcaagaaagactcgcgcaactggtcaccacctgtcattggatcggcgcgaaaggctgggcgccggcgaccggcggcaatatgtcggtgcgtcaggatgatacctggtgctggctaagcgagtcgggccgcgacaaaggcagcctgacaaccgaggattttctgcaggttgagatcgccaccaaccaggcgccttccggacggaagccgtcggccgagaccggtctgcacaccctggtgtatcgcctgttcccggaagccaacgtggtgctgcatgtgcataccgtcaacgccaccgtgctgtcgcgcatcgaaaaaagcgacacgctggcgctgcaggggtatgaaatgcagaaaacccttagcgggcagcatagccatctcgataccgttccgatcgccatcttcgataatgaccaggatattgacgccctggcggcgcggattgccgattatgcgcaaacccgcccgctgcgctacggctttctgctgcgcggccacggcctgacctgctgggggaaagatattcaggaggcccgccgtcaactggaggggctggagttcctgttcgagtgcgagctgatgcgccgccgctacgagccctgagccggagcaggtatggatttttatcttggtatcgatattggcacctcgcgggtgaaagcggtgctgtttgatcagcatttcaccgcctgcgccagcgccgcggaaaacacctcaccccgcctgtcggccaatggctacgcggaacaggatatgacccagctgtggcattcggtgctggctattctgcgccagattgcccgccatccggcgctacaggcggggcggctgcgggctatcggcctcgccgggcaaggggagggggtctggctcagcgatgagcagggcgaaccggtgggcccggggatcctgtggagcgatacccgcagccacgagctaatgagcgacctgctgcgccgacccggcttcgaccgccgctatttcgccgataccggcacccacctgcagccctgcaataccagcctgcagctgtactggctgaaacagtatcagccggcgcggctggcggccgcgcgctatctgtttttcgccaaggactggatccgctttcgcctgaccggcgtggcggcgctggagctgacggacgccagcagctcgttactcaatcagcagaccggcagctggtcctcggtggtgatgaacgagatggggctgaacgaactgctgccgctgtttcccccgctgctggccccggatgccccggccggcacgctgagcgacgcggtggcggcgctgaccgggctgcccgccgcgacgccggtggccgccggggcgctggatgtctgtagcgccgcgctgggctgcggcgcggtcaacgaaggggatatctacacgatcctcggcaccacctgctgcaccgggatcgtctgccgcggcccgcagacggtgaacgaggcgacgcgctttgtcacccataccgaagccggacaggtgatctccctgtttccgatgcaggccggtacgccaaacattgactggctgcagcagcatatttcgctggacgccgatctggggcgcctggagcaggcgatcgcggcggtggagccaggcagcggcggcgtcttctggcagccgtacctcaatggcgaacgtgctccgttttacagcccggacgcgcgggccggctttttcggcattagcccgcacaccacccgcgcccaactgcagcgcgcggtgtttgaaggcctggccttcgccattgtcgatgcgctgcagggttatccgcagggcggcgagctgtatctgaccggcggcggcgcagcctcggcgacctggctgcagattatcgcagactgtaccggacgcacggtggtctccagcgcctttaacgaactgagcgcgcgcggcgcggcgatcctggcggcccgtagcgtcgcggcgctggccgagacgcctccgctggcgcagacccgctatcagccgcgccctcaggcgcatgcccgctacgcggcgctgtatcccgtttaccgcctgctgcgcgagcagatgctgccggtatggcaggccagacaggccgcccttcaacctctttctcaggacctacaaccatgaaaatcgtttttaccgccgagcatgctggcgaccttagcgccttccaccagctgggcgagctgctggtggaggggtgggcgctgggcaaaccgaaactcagcgccggtcagctgattgagctggcccacgacgccgaggtgctggtgaccagctatgatgaggtgacggacgcggtgatggccgcctgtccgcgcctgcaggtaatcgcctgcacccgcgcgaatccggtgaatattgatacccaggccgcccaggcgcgcggcatccgggtgctctacaccccggggcgcaatgccgatgccgccgcggagctgacgcttggcctgatgctcagcctggcgcgccatattccgcaatcccatgcggcgctgaagcggggggaattcacgcaggctgacaatgcctccgccgccactcagcagggtctgcggcgggatgtggtctgggacgtgagcccggaaagcccctatgaagtgtttaaaggcagtgaactgcgcaataaaacgctggggctggtggggtatggcaacattggccgccgggtggcgcgtatcgcccgggcgttcggcatggcggtgttggtggtggatccgttcgtcgccgcagaggatatcaatgagccagggttacagaaaacgaccctggaggcgctgttccgcgaggcggatatcgtcagcctgcacctgagcagcgggccgcacagcgacgggctggtgaatgccgcgctgttaaacagcatgaagcccggcgcgctgctgatcaatacctctcgcgcggcggtggtcgacgaggcagcgctgattgatgccctgcgccacggcccgctgggcggcgcggcgctggatgtctatcaccgcgaaccgctgtggcgcgatcatccttttgtcatcgagttcgataacgtgattatcacgccgcatatcgccggagccacccgggagagtatcgccaaacacacggcgatgattgccgccgatcttcagcgctatgtcgccggggagccgctgctgtaccagtggcgttaagccgcttgcgccgccgcgttctgcagcggcgcgggtccatcgtcaggggcgatgggccgccataaaagcctgggtctgttcccagtccactaccccggcatccgatcccatcccggtcgccaccagcgcggccaccgccgaggcgacgtcacacgctgctttcacgctgagtccgcgcgccagtgcggcaataaacccgccgcagtagctgtcgccgcagccggtggtatccaccgcctcgaccggccacggcgcaatatgctgcggcccgccatcgcggccgataagccaggagccgttctcgccgtctttcagaatgcaggtgcccacgccgagcgccaggaagaagcggccgatggcctccggctgcgtctctccggagagaaaggcggcttcctccagcgaaggcatgaaataatccaccgacggcaacaggggccgcagtagttcgagggtctcttcattcggggcgataaggtcaaagctggtggtgactccgcgcgctttggccgcctgcaacagccgcgcgctctgtccctggtccattgccgccagcagcccggtcccgccgtgatgcaggaaacgacagtcaaggacggcgtcaaattccgcttcactgacaaacagggcgtcagacgcgccccggcagtgcagggccggacgttcgccgttggggcgaatcggcaggatcgtcgccgaggtctccttcagcgcggtgcgctggataagcgagcagtcgatgcccagccgggcatagctggcgaggataaagtcggccttttcatcttcgcccaggcaggccaccgctgcggtgcggatcccgagcttcgcggcgttgatattagccccggcggcggtgccggcggggttgagacgaatttgctcaataaaggcgacgccgccgcgcggcgggatcgccaccaccgggcgcccggcgatatccagaatagtcaggccgacaaatacggcgtcaaaggttgccatcgttctcccgtttagcgatgcgtttggcgcaggcgcgcctgccagaaggatagggcgagggccaccaccagaatcacgccgaccagcgcgtccttcaccagataattgagccccatcaggttcaggccgttatcaataatggcaaggaacagcacgccgccgagggtgccgaggatgctgacccggcccagacgggtaaaggcagtgccgataaatactgccgcaatggcgtccatcaggtaagactgcccggccagcggggtaaactgccgcaggttggcggagaggatcaccccgccgacggcgcagagcgccgaggcggccaccagcacgccgagcatggtcaggcgatcgcggatcccggcgatacgcgccgcttcgctgttctgaccgatggcgcggacatatttgccccacagggtgcgctcggtaaccagccaggccgccagccacagcgccagcacgatcgctaccggcgtggggatcccgccaaggttgcccaccgccaggtcgtgatactccggagccatccgccgataggctatcgcgccgccgccgtcggtatagatgcgctcggcgctgctggcgataaaccaggtgccgagcgtggcgaggaaggggcggatccggcagatgaggatcagaaaggcattgagcaggccaatcagcacgccgccgagcagggcgcagcccaccgcagcctgccacggcagatgccaggttttcagggcgacgagggcgaaggcggcgccgaaatcgagcgcgacgcccaccgacagatcaatcgccccggcgctgacgatcagggtcatcgccatcgccacaatcagcaggatcgcgctgccctgcagcaggttggcccagttatccacggttaaaaataccggattcgcccagccaaacagggcgatggccagcaggatgatgacgccaaatccggcccgcgacagccaggccagcgggctgctggccgtctgttccgccgacgcagaggttttcagggtgatttgactcatgcctcgcctcctttgtgtctgaccgccgaggccgccagcaccaccaggatcaggccgcctttaatggcgcccatccagaagatattgacccccagcaggccgagcccgttagagagggcgttgaccaggattgcccccagcagcgcgccccagatggtgaccacccgacggcgcgagaaggcggcgccgataaaggtcgccagcacggtctccagcagcagcggcgtggccgtcccgctggagctgccggagccctggctgagcagcggtagaatagccagcccggcggcaatgcccgctaacagccagaccagcagggtcaagcggcgcacgttcaggccgctcatctgcgccatatcgcgattgccgcccaccgcctgcacatgctggccgaagcgggagtggtggagcaggaactggaacaggataaacacccccagcaggtagaccagcggccagggcaggtccagcacgctgttgtcgcgaaaggcgaccatcagcggatcgctgaccgcgatgcgtcgctggccggtcaacagatctgtcaggccggtaaacgccaccgaggtcgagagggtggccagcagcggcggcaggccggccgccagcaccagcaagccgttgatcgccccgcacagcaggcaaaccgccgccagcagcgccagcagcaggagatacggcgtgtgccattcggccagcccgaggctgagcagcgcgacgccgagcaccgccgtcgccggcagggagaggtcgatgccgccggagaccacgtcatctccgcccacggcgataacgcagaccaggccgaaacaaaggattgccagcggaacgctctggaccagcatcaggctgatattttgccagctgagaaagtagggcgactgtacgctcagccataccagcagcgccagaaacaggatcaggggaaatttttcaatcagcgtcgccaggcccggacggccgcgacgctggatagcagtactcatggtgaaggctcctgtccgccgttgatcgccaccagcagggcgtccagcgttagcccgcgggtgggcagattggccgccagcgcgccgcgccagaggaccaggatccggtcgcatagtccgagcagttcgagggcgtcgctggaggagaccagcaccgcccgtccttgatcggccagctggcgcgtacgttgataaatatcccggcgggcgccgatatcgacccccagggtgggttcatcgagaataaacagccgggcatcggtccccagccagcgggcgaggatcgctttttgctgattaccgccgctcatgtagcgtaccggcagccccgggcgtcccgggcggatcgccagctgttctatccagtcgcgcgctttctgctcggcgataccccgccgctcccagccaaaggtggcggtctccggcagcgaggcgagattaatattgtcggcggtggtgaagggcaggatcagcccctgatggcggcggtcgcgcggcaccagcgccatgccggcgcggatcgcctgctttggcgtacgaatgcgccgcggccggccctcgaggtggatggtgccgcgttccgccgggcgtaagccgtagagtaagtcgaccagcacatcgcgtccggcgcccagcaggccggcgacgccgacgatttcgcccggctgaatatcaaaagaaagctcctgcagctgccgcccgtcgctcagctggcgcaccgagagcagcgggatcgccccattgtctgccgccgggcgctggcgcggagtatacagctggtcgatttcccggccgaccatcatggcgatcagcgcctcggtattctgcagcaggtcgcggtccgggtaaccgaccacttccccgttgcgcagtacggtgccgcggtcgcagagggtggctatctcattgaggtagtgggaaatatacagaatggcaatgccctggtcgcgcaggcgcaggatagcggaggagaccagactggcctcctgcgcctccaggggggcggtgggctcgtcgaacaccaccagccgcgccgcgccgtcgatcagcgcgcgggcaatctgcaccagcttgcgctcggccaggctcaggtcgcgcaccaaccgttcggggtcgatcgccagctgccagttttgctggaaaaattgcgccgtggcggccttcatccgtcggcgatccagcgccccccagcgggtgcgatactcctggcccagaaacaccgattccgcgacggtaaagtgcgggatcaggttcaactcctggtggataacgcggatgccggcggcttcgatggctgccggattgctgaggggcagcgggtgaccgtcgagggtggcgctgccgctgtcggcctgatagacaccggcgaggatcttgatcagcgtcgatttaccggcgccgttctcgccaatcaggccatgaatctcccccggattgaggcgcagggtaaccgcattaagcgcggtgacgctggcaaaacgtttaccgatctgctccatgaccagaccagcggcggggcgttccccgccaggatgttgattaatcactgcagctcgccgtatcccaactgtttatacaccgctttcgcttcctgcggacctttcaccggaaccaccggaataaaggtttgcaccggtagtttctggccggcaaagtagcgggccacgttgtcagccgaggtctggccgatcagatgcggctgctgcgcgacgttagccacgaacgggctgccgggctccgccatgatctccagggtctccggaccggcgtcgatggccgtcactttcacgtctttatcgcgaccggtctcttccagcgcctggacgatgccgatggccggttgatcccagcaggcgacatggatggcgtccagtttgcctttcggatactggctgagtaattcgagggttttcttgcgcgcgtcttccggcgaattggcaaactgttccgcgagctcgggctggataatatgaatatccggataatccttaaggacatatttccactgatcgtagcgaattccgcaaatacgcagcgcgctggagaaggcgttaaatacggcgacgttgcctttgccgcctaattcatccgccatgtagcggccgatggttgagcctaaggtgtagttatcggaagtggtattgttgaccgaatattgagaaacatgatctacggtaaataccgggataccggcatcacgcaatgctttaaattttggttcgacggcgctatcgccgagaatactaattaccgcgtccaccttgcgtgacagtaaaatatcgtggttattggcatgcacctgattatcgcggccgccatcgacgccaatgactttgccccccagcttctccacctcctctgtcgcgcctttaaaggcctcgcgatcccagaaatgctgagtgccgaccacggcaacgccaatggtttttccctgtaaggagagggcgtctgcggcagcgacgctcagcgaggcaagggaaagcagtcccagcgcggcaggcaataattttctcttctgcgacattgttattatgatcctgtgatgaaggtggttgcggaccggtagcatgacaagaagcacctcgccacctcaaatacaaaataagtctaagttatgccaggaatgttatatcgcagaaacgtcagagaaaaagtttattttgtcatgaggaacctgaaaatatttcatgatggcggatagacctttttattttgtggttttatttttgacttattccgtgtttatttagcggataaagacaattttcttaatattgtgagtgcatgggaaatacggcgtctacagagaaaaaaagaagattgcgcgggctaaagctttttttagcagagcaatgtctggccgggtaaggattattaccctatttccccgctttattgtaatgaaccttaagctgagaagaacgcgggcgctatgaagaaacagcataattatacggtgatgcactggggaacctggcaggtggagagccgtgagggcgagatcgtggcggttaagccggtgccctgggataaaaatccctcacgcatcggccagtcgctccccgacgcggtgaccagccaaacgcgcattcgccgtccggcggtgcgcgccggctatctccagcacgggccggcgtcacgagaagggcgaggtaaagagccctttgtcgaagtcagctgggaggtggccctggacctgctggcgcgcgagctgcgctcggtcaaggcgcgctgcggcaatgaggcgatctacggcggctcctacggctgggccagcgctggacgctttcaccatgcgcagagccagctgcaccggtttctcaagggctttggcgggtacaccgccagcaccaatacctatagcagcgccgcgggcgagcgtattctgccgcatattctcgggccgctgagcccgctgcaccggcagcatacccatttttccgagctggctcgggagtgtcagctgtttgtcgccatcggcggactgccgctgcgcaatgcccaggtcaacggcggcggcgccaatgaccatatgctccagtactggctggataagatgcaggccaacggcacgcggtttatcaatatcagtccggtgcgcaatgacctcagcgcggtgcccgacgccgagtggctggccattcggccgggtaccgatatcgcactgctgctggccctgagctatgtgctgatcgctgagtctctctacgaccaggcgtttgttgccagccataccgtcgggtttgccccctatcgcgcttatctgttgggcgagcacgatggcgtagcgaaaaccccggcgtgggcggcggcgattaccggcctggacgcccagcgcatcgccgacctggcgcgggagatggcccgccaccggacgatggtgaatatctcctggtctatccagcgcgcccgtcaaggggagcaggcctactgggcgacggtggccctgaccgcgctgctgggacagctcggcaccccgggcggcggcctcgggtttggctacgcctgcaccaacctggcgggcgcggtgcgaaaagcgttttccggcccgcgcttacccgccggggagaatgcggtggacagcgttatcccggtggcgcggctgtccgatatgctgctgcacccgggagaaacctatgagttcgacggtcagcagcggcgctatcccgatatccgtttagtctactgggcgggaggcaatgcgtttcatcatcatcaggacatcaaccgactgtgcgaggcctggcgccgcccggagacggtggtggtgcatgagcagtactggaccgcgcaggccaaattctccgatatcgttctgccggccaccacctcgctggagcgagaggatatcggcagcggcggtcacgacgggtttatgatcgccatgagcgcgcagatcccgccggtgggcgaagcgcgtgacgattacgccattttctgcgatctggccgggcggctgggcttcggggaagcgttcagcgaagggcgtgacgccgggcagtggctacgtcatctctatgaggagtcaagaccgcgggcgcaggaggagggtattgcgctgccctcgttcgatgacttctggcagcaaggggtgctggaatacagcgcgccggagcggccgcaaatttttctcgccgattttcgcgccgatccgcagcgctatccgctctccaccccctccggcaaaattgaactcttttccgccaccgtcgccgggtttggctatcgcgaatgccctggccatccgtggtgggatgaacaggaggccgcccgccagcggcaggaggcggcgcgctggccgcttcatctgctctccagccagccgcgcgcccgcctgcacagtcagtacgaccacggcagcgtcagccgggcgacgaaagttcagggacgcgagccgctgtggatgcatccgagcgatgcgcaggcaagggatatccgcgaaggcagcgtggtgaaagtctataacgaccgcggggcaattctggcgggggtgcacctgagcgagcagattttgcccggcgtggtacagatgtccaccggcgcctggtatgacccgctggatccgaaggaagaacggtcgctcgataagcacggtaatcccaacgtattaaccgaggatcgcggcagttcgcgcctggggcagggctgtagcgcccagagctgttgggtggagatcgccccgtggcgagaggagctgccgccgatcactgcctttgatccgccgaaatttattgaagtttaggcgttggcgctcgccggcggcggggcgggtagcccggagaaggcgcggtatgcgccgcctccggcaaagcccgcgcctggcggttttagactgacgacagtttgacgttacgccagccgcgggtaggcgctggcgatatcgtcgccggtaaactgggcgatccagccttccgggttatcaaaaatgcgaatggcggtgaagttcggttctgatcccatatcaaaccagtgcggagtgtgggcgggaaccgaaatcagatcgttcttttcgcacagcacctggaacacctcgtcgccaatgtgcaggcaaaacaggccagcgccctcgacaaaaaaccgcacctcgtcttcgccatgggtgtgctcgttcaggaacttttcccgcagcgcctctttttgcgggttatcggcgcgcaggctgatgacgtcccagctctggtagcccttttcggcgaccagtttatcaatcgcatgctgataggcggcaatcaccgtttccgggctgggatttgcgccgaggtcgcggtcggcctgccagcgctcgaagcggacgcctttggcgttaagctgcgcctgaatcgctttggcgtcggtgctgtgccagaccggcgtttgcggatcggtcacggaaaaaagagttaatgcgctcatgctgggatctgctccggatgaatgtcgtcaaaacgctgaacctgaggatggtggctcgccgggtcgcggtcgccgcgtaccaactggatcgttcgcaaacccgcggcctcggcggcatcaagttcctgatggatatccgacagaaacaggatggtgccaggggcatggcccaggtgttcagcaatgttacggtaggactgcacctcacgtttggcgcctaccagggtatcgaaatagcccgtgaacagatgagtaatatcaccttcatcgctgtagccaaataacaatttctgcgcagccaccgagcctgaggaatatacatacagatcaataccctgcgctttccattgctccagcgccggcagtacgtccgggtagagatggccggtaaagtcgccgttgagatagccgtcgcgccagatgatcccctgcagcgccttcagcgccgtggatttacggtcttcatccataaaggcgaagagggtagtgataaggtcggcggtgctggcggcgggggcgtctgtttcgcggcgcaggttgtcgagaatggttttaaccggttcagcgtgctgctgagcggtcacaaagccggccagtcgttcgcgggcgtaggggaacagcacgttatgcacgaagcggatatcgctggtggtgccttctatgtcggtcacgatggcgcggatcatggtttctccagagtgggcgtagcgtggaataacattagcatttagacgtctaagcgtcttgattgccaaatattaacatcgtgttatagtggcttcaacaacagcattacaatcggtataaaaagaatgaacaataaccccttgattccagagagtaaacttcctgcgctcggcaccacgatttttacccagatgagcgccctggcccagcagcatcaggccataaacctgtcccagggctttcccgattttgacggcccgcgctatcttcaggagcgtctggcgtaccacgtggcgcagggggcgaatcagtacgccccgatgaccggcgtgccggcgctgcgcgaggcgatcgccgggaagacggcggagctgtatggttaccagcccgacgttaacagcgagatcacggtcaccgccggcgcgacggaggccctgtatgcggcgatcaccgccctggtgcgccgcggcgacgaggtgatctgtttcgatcccagctatgacagctacgcccccgcggtggcgctggccggcggcgagttacgtcgtattgcgctgcagccgccgcattttcgcgtcgactggcggcaatttgccgccgccctgagcgagaaaacccggctggtgatcctcaacaccccgcacaacccttcggccaccgtctggcagcgcgaggattttgccgccctgtggcaggcgatcgccgaacgcgagatctatgtcctgagcgatgaagtctatgagcatatctgctttgctgagggcggccacgccagcgtactggcgcatccacagctgcgcgagcgggcggtggcggtctcttcgtttggcaaaacctttcatatgaccggctggaaggtcggctactgcgtggccccgacggccatcagcgccgaactgcgcaaggtgcaccagtatctgaccttctcggtgaataccccggcgcagctggcgatcgccgacatgctgcgcgaagcgccggagcattatcgtgagctgccggcgttttatcgggaacgtcgcgatctgtttattgaagcgctgcgcccaagccggctggaaatcctgccctgtgaagggacctatttcctgctggcggactacagcgccatctccgatcttgacgatgtcagcttctgccgctggttgaccactcagatcggcgtggcggcgatcccgctctccgtcttctgcgccgatccgttcccgcacaagctgatccgcttgtgcttcgccaaacagccggcgactctgctggctgcggcggcgcgtttgtgccagctgtagttacttaatcgtccacgcctgggagaactggcggccggcgaacatttctgtcaggccgctaatttgcttcagacgcagcacttcatcggcatccatccccagctctttgccgattttctgcggcgtccagccgagctgggtcagctcgcggacgatctctgacatggcgtggatttggtggcgaccgcgcgcccggttatggcgtatggtcgctgccatcagcccgtcacgcgaggcagcttcactcgtcaggcaggtcaccggcaaatagccttttagcgtttttttcagcgcggctttgctgcaggccagctcatggcggtgaaaaccatcgacaatcgtatacgcctgtgggcgttgctggatgacgacgaccggctgggtaaagccgtcggcctccagcgacgtttgcagcagacgcttctccggcggcgccacgttattcgggttgtaatcgttgggggcgaccagctcctgtttgacccacagcacgcagtcgacgggctgcgagcggaaggggctgtagtggtggagcacctggcgaaacgcgttgatagcctcaatgcgcgcctcgtcatccagcttttgcaggtaagcttccagcgcctgcgtcagttgttgttgcataatatcccccattgttggcgatgtttttccatgcgtttacggtagcgctgatagtggctgcttttggttgggctaaacgaaagctgacggcaccagtaatcgttattgagcagtactttgcagactcgccgccaggatgggatatctttggtgccaatgtccgcaggttgggtatccggaatatcctccataccttttttctggtaccagcgcaggtagacggcgattttattgcggtagtgctcggcggtggtttccggcatgctgtcgagcaggaacagggcgtagcttttccacgtcaggtggtcgggcttgtcgattttccgatgaccgtagaactgattatcatgcccggcatagaccccgccgctgtgcgcgccgctcactcgctggcacatcgcggcccagcgctcaggttccagcacgtgatacagccacagcccctggcgctgctcgggaccaaacggttcgcaaatgcgcatatagcgcagcggcaccccggcctgatacatcagatcgtacaacgggttatagggctcgccgcttttggcaaaccaggtccagatatcggcggttttccagtcatagagcgggtagatgtaccaggcgtggccgcccggcgctgaagtggtccatggtttatcgtcggcgaagcgctgtttacgctgtgaagaaatcgtcataaagcgatttagcgattcgtcggcgcgaatgcccaccagcacggcggcgggacgacgctgcgaaaaccactcggcgaagtggctgacgaaggcttcaaagctcattccgggttgataaaatgaaaaatagcccgggtgggtaatggcccagggcggcggctggcgtacccactcggttccgggctcccagcattgccattgcggcttatactgcgtcagggcattttgggtggtgagcggtagggcgacccagtaaaaggtttcgatgacatccgcatacagcgcacgcagtttttcacagtgggcgatggtgcaggagaactgcgcttcccagtcaataaacaacacgcagatttttttcccctgtaaccgcgccgcctgggcggttaaatgcagcataacggtggaatcttttcccccggaaaaagagacacagatgcgcgaaaaattatccatgacccactggatccgctgctcagttgcctgcagcaccgattccggtaagggatatttaataaacgacatgaccattaatcctttaatagtagaaaattcccgttagctcagtataaacgatgaggggtaggaaattaatggtcgattattgtttctggcagcgggggaacagaagggcgttattcgctgtgattaaattggggccgtgatgcctctcgatcattcattaatatggtgattaattcagttaaaaaatgattttgcgaagatgcatggtggtaattaatgtagatcgtgatatccggaaaaagattatctatgttgatggcgtgaagctgcatagtgggtgagataaagtcatataaataggaaggcaaaaagccaattaagtcggttttattaatcatgttaagaatggtcataaaagagtcgctgcgaaaggcaatattgcgcggattcagccaggcgatgctgctttgctgcacgcgctgaataacgggatcgttggtaatatagtgagtgaaaaactcctgcgccagtgactctaccgaggtaagcgtttcgcgtcgcggatggcccgcccggcaaaccgccagcgtctgcaccgtctgatagggctgacagatcgtggcgcggttggtaatgggcatgcgggtgaacaccaggtccgcctggcgatacgccagcagctcctcagccgattcggtggtggtcaggttatggtgctcaatttgcaagttcgcctgatgacagagctggttaatcataacgtggctattgactgaacagaacagcggggggccatatatcacaatacgtttacgcagttctgagcgattatttagattgatggttttttccagctgctccagattttgctgtagatgataatgaagattgacgcaggcggtggtgggcgtcattcctttgccaacacgaacaaatagcggatcgtttaactgctggcgcagacgctgcaacgactgactcaccgctgagggggtgataaataacatcgccgccgctttgctgatgctcaaatgttgatagatacattcgaaaataaccaataaattcaaatcgaactttttcagatcgtaaagatttgccattaatgcagtcctgtttattaccggtgcggattatgatattcttaatgataatgttttgtagcttaatatttgcggtgtgaatttaattattggcaaatacagttaagttctgcttaatatatcttatcgtcgacggtggcgccagcggtcgcttccgccaggcgccactgcgggatggaattactctttttcacccatcataatatgcagtttctctttatccggtaggccgaccacctgctgcagcatattatctttattcatataataaatcgccggcgtcacgttggctcccagatcgtccatcagctgctggttgacgttgagcattttcattttctccggcggaatagctttcgggatcgtcagggccatttttccattcgattgctcataatcatgccaggtcttcgccggatccttggtggccagaatcgcggcggcggtggccgggctttcgggcttgatcacccccaccagcagggtgcggatctgcactttaccggcttccacccaggggcgggactgctgccagaactgtttacagtaggggcagaagggatcggcaaagacatacaacacgatgggggcgtccttattgccatcctgcagccagtgggcgctggccatcttcttccacatctcctgtcctgccggcgtgtagagctctttttgaaacaactgctcgctgaggttgttgccgttctcgtcatacatatagccggaaatggcatgtttgccgtccggcgtgaggtagatggtgacccccatgtcctggtatttgcccagccagcctttcattccccccggcgcctcaaagggttttataatagtaatgccctgtttttcaatcgcttttaccggagcggggagctcctccgcctggctgcataacggaaaaaggctgagcaagagaagacgctttaacatgaatattccttgtaaaatcagcaggaaagggcaaaacgattgtcgaacctatcacagtcataggcaagatcagcagaatgacggattgccctttgctggcgtgggtgatgtaatcctgaatgctgttacattaaggtaatgtagagcgcaacacatagccagtttgactggcgctgaacctaccttcgggtatttcaggtaacggggccgcctgaaagggtggcctttttacttttgtcgcggcaaatgatgcgaaaaaaagcgatcagcgctgaacgcgtcgacaggttcacagagttgtcttgttccggttgttagataacgcttattgattcgataatgtaaacgcattggtcgggtcaggaaaaattcgttaacttagacctcaacgaaaacacggaggaagtatagatgtccttaattaacaccaaaatcaaaccgttcaaaaaccaggcattcaaaaatggtgaattcatcgaagtcaccgagaaagacaccgaaggccgctggagcgtcttcttcttctatccggctgacttcactttcgtctgcccgaccgaactgggcgacgtggctgaccattacgaagaactgcagaagctgggcgtagacgtttactctgtgtctaccgatacccacttcacccacaaagcgtggcacagcagctctgaaaccatcgcgaaaatcaaatacgcgatgatcggcgacccgactggcgccctgacccgtaacttcgacaatatgcgtgaagatgaaggtttggctgaccgtgccaccttcgtggttgacccgcagggtatcatccaggcgatcgaagttaccgctgaaggtatcggccgtgatgcgtctgacctgctgcgtaaaatcaaagcggcgcagtacgttgcttctcacccaggcgaagtctgcccggctaaatggaaagaaggcgaagcgacactggctccgtctctggacctggtcggtaagatttaagtctgtttgtgcccggcggcgctacgcttgcacgggcctacaacatcgtaggccgggtaaacggcgtgccacccggcaatcaatgggcgctttcgcgcccattttattccaacaccatgatgcaagcgcattcaggcagcctgacgaggccgcttgcatgatgatgttttaagcccaggagataacaatgctcgacaccaacatgaaaacccagctcaaggcctaccttgagaagctgaccaagcctgttgagctgattgccacgctggatgacagcgctaaatcggcagaaatcaaggaactgttggctgaaatcgctgaactgtcagacaaagtcacctttaaagaagacaacacgctcgcggtacgtaagccctcgttcctgattactaacccaggttccgaccagggcccgcgttttgcaggctccccgctgggccacgagtttacctcgctggtgctggcgctgctgtggaccggcggtcatccgtcgaaagaggcccagtcgctgctggagcagatccgcgatattgatggcgatttcgaattcgaaacctactattcgctctcctgtcataactgcccggacgtggtccaggccctgaacctgatggcggtgctcaacccgcgcatcaaacacacggcgattgacggcgggaccttccagaatgagatcaccgagcgtaacgtcatgggcgtgccagcggtgttcatgaacggtcaggagtttggtcagggacggatgacgctgactgaaatcgtcgccaaagtggataccggtgcggaaaaacgcgcagcggaagagctgaatcagcgtgacgcttacgatgtactgatcgttggctccggcccgtccggcgcggcggcggcggtctactctgcacgtaaagggattcgtaccggcctgatgggcgaacgcttcggcggtcaggtgctggataccgtggatatcgaaaactatatttcggtgccgaaaactgaaggccagaagctggcaggcgcgctgaaagcgcacgtcaatgactataacgtagacgtgatcgactcccagagtgcgaccaaactgacgccggcggcgacagagggcggcctgcatcagatcgaaaccgcctccggcgcggtgctcaaggcgcgtagcgtcatcatcgccaccggggcgaaatggcgcaatatgaacgtgccgggcgaagaacagtatcgcaccaagggcgtgacctactgccctcactgcgatggtccgctgtttaagggcaaacgcgtagcggtaatcggcggcggcaactccggcgtggaagccgccattgacctggcgggcgtagtggagcacgtaaccctgctggagtttgccccagagatgaaagccgaccaggtgttgcaggataaagtccgcagcctgaagaatgtcgacatcattcttaatgcgcagaccacggaagtgaaaggcgatggcagcaaagtcaccggtctgcagtatcgtgaccgggtgagcggcgatgagcatcatgtcgcgctggcggggatcttcgtccagattggcctgctgcctaacaccacctggctggaaggcgccgttgagcgcaaccgcatgggcgagatcatcatcgatgcgaagtgcgaaaccaacgtcaaaggcgtgttcgccgcgggcgattgcaccaccgtgccgtacaaacagattattatcgcggcaggggaaggggcaaaagcgtcgctgagcgctttcgactacctgatccgcacgaaaaccgcataacaagtcagacaatagacctgcataacaaagaggctacccaggggtagcctctttttttatgctcttttcgtcattcttacctgacgaccattaccgggatatgggcatggcggatcacgctcgaggcattggagccgagcaggtgggtactgatggagggattgcgtgagccaataactaccacgtcggcgttaatttcgctggccagctcgttgaccatatcgcgcacgctgccaaaacggacatgtagcttgatacgagacgggtcaatgctgaagtggctgaccatcgtctgcaggcgagtctccgcctcatgctgcagatgttcctcaaaccgccgcaggtcggcggtaaaacggctcatggtaaagctcgcggaacccggtaagacgtggagcagatggatcaccccgtcctgctgggccagaaactccgcgtgccggacggctttatcgctcagcgccatctcaaagacatcaaccggcataatgatagtcttatacatatgcaatcctccttgttcatttgcgtctatatcaacatattatatgcggatatagtgtcattcaggtcgcaaaactgtcagtcaggcaggtgcaaagcgtaaaaaaaggttagcgaggaaggaacagcagaaagaggatgtatggacatcctctgaataaagcgcgaaacgcctcaggcagcagggattagcggtggaattcgccagcggcttccggctggtacaatagctccagcacttccaggtgcgtcgatgcgccgcccggcagctcccagtgaatggtgctgccgactttcaggcccagcagcgcggcgcccaccggcgcgaggacggagagctggctggcgctgtcggtcacctgtgacggaaacaccagcgtccgcacgcgctcttcgccgctggttaaatcgcggaattttaccctgctattcatggtgacgacatcatgcggcatcgcttccggggccagcatttgcgcgcggtcgagttcctcattcagggcatcggcaaccggtgagttggcgaaagccggctgctccagcagcctgtcgatacgttcggcatccagttcattaatgatgattgcgggtctggtcattgcatactccatgttatccaggaacctgtccgtaaaagaaaaccctcgccgaaaggggcaagggttaaggtcctaccatcatactgagagttgccggcagtttgaagtgatgaaacgcacattcagcgtgcaacaccatccggcggacggtgttttccaatcagcatcccgctttacgctagtggccaaccttatcgaggataaactgtgcgccgcagttacccgggtgaggctggggcagaaaagcggaagtggccagcggggcgttgatggtcgcggcgttgagcgagatttgcatctccgtcagataggccggattaccgttgcaggttagcttaaacgccttcacgctctgcggaccccaggcgcgggccacggcggcgtcgaagtcggcgcggctgaccgtttggccatagtgcttcgcgagaaaatcccccaccgggctgcgcttaatttcaccgtttagtcgcaccatggcgccaaagtagctgtcgggatcgaagccgaagcagacgccatgtttggcatattcgtagcgttccaggcaggaggtgccgcccgatcccggcatcacattattaagtttattggccatctccagcgacagtccggtctccgccgcctggcatttgcggttcgcttttacctccggcatgttgggcaccggacgcgtggcgcagccgtagcgcatccagcgacgttcatccactccgcgcgcggcaatggactttggcagcccgggccacaggccatgcacggtcagaaagtcggctttattcgcggtgtcctgctgcaggcgacactcttccggttcgttgcgattgcggtcatacatgctctgacagaatccggtttgccaggagagggcaaggacgtagcggtcaaaatcagcgtatcgcgtcgcggtgagcggttcagcaccggcctgagtggcggtaagcacaagggcaatcgcggcgaaatccttcctgaacatttttattcctgattatggatggcaaaagataacggggagttattaaagcataaaaaaggcgcccgctggcgccttttcgcgtggttagaccattagtggagcgcgctgccgggcaccaggatttcagtagcaacgatcaccaccagcaggccaacgagcaccggcactgaggtgcgcttgaccacttcgaatggggaaatcttcgccatcccggcaacggcgaccaccaccccggagacgggcgatatcgtgcggccgaggttagaagcctgcagcatcggaatcgacaggtaggccggattgatgccggaggagtgcgccagcttggggatcatctcaacaaaggcgtagaacggggcattaccggaaccggtggtcatcgccgccagcatggtcaggatcaccagcaccagcatcagaataatgctggccgagccgaaggaggtggcgattgagatcagaccgttgataaagccgatagtgcttaacccctgggcaaagacgccggcggcaaccaacagcatcactacgccggcgaaggcgtcggccattccacggtaggcgacttccagcccgctaaagacgtttttggtgttgaaaccgcgcaggaactcgaggatcgccgccagcagtatgcagccaacgaggatggtgataatgtgcagctccggcccccatttaccgtcaaagatcagcacgccgatgatcggggtaaacggcagaatggcatacagcgccggggcggtggtggtgatgtcgttgacatcgagcatctcgtgagaaatgtgctcttttttatccagatagcgctgccagaaaaagtgggcgatcgccatgcagataatggccgcgatggagatcggcagcgtggttttaaaagcaaagtcgatcagcggcatttcagcggctttggccgccaggacgacgtcacccgaggttggcgagaggataatcgccgccggtgaggcgcagatggcggcggcggccccgcggctgataccgacattcaccattaccgggaacagcgtcgccatcagcagtacgccaaggccggtcgcggaggagacggccagcgacatcaggcaggcgacaaaataggcggcaatcatcagcagatagggcgaattaatatagcgcaacggcttcgacgctaatttgaccaccatatcattggcgccaatatgggtcatataggtggcgaagccgcacagcatcatgatcatcatacccaaatcgccgccgcggctcatgagtagaatcttaatgtattcaataatatcggtagcggaatagccggtgctcgcggtattacccggtaacactttatgtcccagcagggcgctgacgatcagtaagattaagcctccgacgaacagcaccccggtggccgagtagcctttaatgatatagcgggctacgcccacaatgaccacgatccctatcaggatctcaataaacgtcagcatttattacccctaaacccaaagaatatgtagctaaaaagcaccacaccaaattttaatgtgcgaatgtgccgaaaaaacggacaaaactcgctgatgcaaatcaataaagcgataagaactacacgtcccccgtcacgcctggatataatcaccagatggatagttaagccgttctgatggacagcgggcgaaaatcaggagtttgccttatttcgttcaacctgcattgagattatctttgctattttaggtggtttttaaatcaaagtggtaatagaaaagtgttgatgttacgtcgtttttcattgttttctcttggttttttaggatggttattggtgtccggaaacgccagcgcgtcgttttcatcgacccttagcgaaggttaccataccttaagtaataacgtagcgcagacctggaatgagccggagcactatgatttgtacgttccagccatcacctggcatgcgcgctttgcctatgacaaggaaaaaaccgataagtataacgaacgtccgtggggggcaggtttcggcgtctcgcgctgggatgagaaagggaactggcatggcctgtacctgatggcgtttaaagactcttttaataagtgggagcccatcggcggctacggctgggagaaaacctggcgcccgctgacggaccagaatttccacctcggccttggctataccctcggcgtcacggcgcgcgataactggaactacatcccgatcccggtgatcttgccattggcgtcaataggttacggtccggcaactttccagatgacctatattcccggcacctacaataacggtaacgtttacttcgcctgggcgcgcttccagttttaattcgctaagtcttagcaataaatgagataagcggaaggtcttgtgcaaaaacaaggactaaagcgttacccactaaaaaagatagcgacttttatcactttttagcaaagttgcactggacaaaaggtaccacaattggtgtactgatacccgacacagcattagtgtcgatttttcatataaaggtaattttgatgtctaagattaaaggtaacgttaagtggtttaatgagtccaaaggattcggtttcattactccggaagatggcagcaaagatgtattcgtacacttctctgcaatccagtccaacggtttcaaaactctggctgaaggtcagcgcgtagagttcgaaatcactaacggtgccaaaggcccttctgctgcaaacgtcatcgctctgtaagcaacgcgtcagtagaatataaaaacccgctaataagcgggtttttttttgcctgtctccttcgcttttagcggctggccgcctgcgagaaaagccagaaggcgaccgccgtcatcgcaaacgaacccagcaaattcaccgcgacgttgagcagcgcccagcttacccggccctgctgcaggagaaacaccacctccgcagaaaaggtggagaacgtggtcaggccgccgcagaaaccggtggtaatcagcagtttccacatcgggtcaataccggtcagacgattaaaccacgccagcccggcgccaatcacaaaggcgcctaacaggttggccgttagagtcccaatcgggatagcatggtgcacaggattgagcttcatgccgagccaccagcgcaatacgctgccggtgccgccgccaataaaaacggcgcaaagaagttgaaacacggtcgtttcctgctatttgatgtaagagagtgtcaagtgtagcgcgcatcgggcgcgattggctatccataacctgacgggagaagaacatgcgggtagcggcaggacaatttgccgtcacgccagtatggcggacgaatgcgcaaacctgtgtggcgatgatgcagcaggcggagcgagaaggggcggcactgctggtgctgccggaggcgttgctggcgcgggatgacaacgacccggatctgtcagttaaatcggcccagccgctggatggcgcatttttgcagccgctgttggccgagagcaggcgtaacagcctgaccacggtcctgacgctccatgtgccgtcaggggaggggagagcgaccaacacgttggtggtgttacgggaaggcgcagtgatcgcccattatcacaaacttcatctatatgacgccttcgcgatgcaggagtcccggcgggtggatcccggtcagcagatcccgccggtgattgaggtggcgggattacgcgttggcctgatgacctgctacgatcttcgctttccggaactggcgctttcgttggccctgaatggggcacagctgctggtgctgcccgctgcatgggtgaaagggccgcagaaagagtatcactgggcgacgctgctggcggcacgcgctctcgatactacctgctatatcgtggcggcaggcgaatgcggaacgcgcaatatcgggctgagccgcatcgtcgatccgctggggaccactctggcgggggccgggagcgagccgcagctgatctttgccgatctctcagcggatgaccttgcgcgcgttcgcgagcgtttgccagtgctgcggaaccgacgatttgcgccaccgcaattattatgacgtttttttaaacaaggcttgattcaccttgttacagattgctattgtgtccgcgcgtcaaatacccgtattgtttatcccaataattcgctgtgcacgtcaggatggacatctcagcgctcactcccggaggggaggctatgggccgaaacacgcagcccacgcacaggtggattacaataggacggataaatgcgtgtatgatggcgtattcgcagcttgtatagagaagaaggttagctatgggtgagattagtattaccaaactgctggtagtcgcagcactgattatcttagtgtttggtaccaagaaattacgtacgctgggcggcgacctggggtcggctatcaagggctttaaaaaagccatgaacgaagatgacgatagcgcgaagaaaaccaccgcagaagaagaagcgccggcgcagaagctctctcataaagagtaattctccggctgcgtctcctgacgggatgctggcggtacggcgaagaggccgcgacgtttatcgttgcggcctttgtcgtttttgtcgacgccgcggagaaaagatgcaactaactgttacggacaggcgaaacggatgaagcggagagagccgctgcgccgaacaggcgcgcagcggcggaagcggtgggttatttaacttccatccctttagcctgcaggtcggcatgataggaagagcggacgaagggaccgcaggcggcgtgggtgaagcccatcgccatcgcttccgctttcatctcttcaaactcttccgggctgacgtagcgctgcaccggcaggtggtgacggctcggctgcagatactggcctaacgtcagcatggtgacgccatggcgacgcaggtcgcgcatcacttcgatgatctcgtcgttggtttcgcccagacctaccatcaggccggatttcgtcgggatctccgggtgcgcttctttaaaacgctccagcagcttcagcgaccagttgtaatccgcgcccggacgtacctgacgataaagacggggcacgttttcgaggttatggttgaagacatccggcggggtcaccgtcagaatatcaagtgcgcgatccatgcggccgcggaaatccggaaccagcgtttcgatcttaatcgacgggtttttctcgcgaatggcgctgatgcagtcggcaaaatgctgtgcgccgccatcacgcaggtcgtcacggtctaccgaggtgactacgacatagcgcagacccatatcggcgatagtttgcgccagcttttgtggctcgtttgcatctggcgcgaccgggcgtccatgcgcgacgtcgcagaacgggcaacggcgggtacagatcgcgccgaggatcataaaggtcgcggtaccgtggttgaagcattctgcaaggttcgggcaggaggcctcttcgcacacagagtgcaggccgttcttacgcatcgctgctttgattccctggatacgggacgagtctgccggaagtttgattttcatccattccggttttctgagcagagcttcacgctcagttgccacgtttttcaccgggataagggccattttatcggcgtcgcggtacttaacaccgcgttccatcacaatgggtttactcatagcgtgcgtgttccagttgcgagtcacgaaggaaagcgaattaattcaatgaaatgttgcaattatcaactatttttgaatcaagagcaggcagtataccattgaaaaggggcagaaagcagcctgcctgcccggcaaattgtaaaatagttgttgttttatccttttcccttccgtgcgctacgccttaaacgagcggatcaccgtctcgatgatctctttcagcaatggctctttcccgctcagcttattaaagtgcagcgcaacgtcaatctgctctccacccagggaagggaaatccagggtctgcagcggccagagacgggacaccatggcgaacaggcgttcggtggtcagacccagcatatcgctcccggcgatcatcgccgcctgggtcatcaggttaaaggtgctaaagccgcagcggcgctcgcccatctcttcctgtagtcggcgatggagggtggggtagcgctggccttccggcagcagcagcgcaaattcgtactccgcgagggtcgtttcatcctgcggaccgtccagcgcgggatgccctgcgcggcagtacatctgtacccgatcctgatacagcacatgatggcttatcgcctggccgctgtgcaggtgggtatcaatgagcagatccacctggcgctggtcaagctgccgcgcggcgtcgacgatggcgatattgtgcaacaggatctgcggaaaggtcggcttcagcgcgctggccaggccaggcatcagcagcgctcccatcgctggcgtagtggcgatagtgatcacccgctgctggtgcgggctaccggtgatatccagcgcgctgaggaaagcttccatgccgcggctgatgtattgatgaagatgggtggcataggcggtgggggtgacgccctgtcctttgcggataaatagcggatcggggaacaacgcccgcagtttgttaattgactggctaatcgccgacggtgtgatattgagtatcttcgcggcgttgacgatacctttatgtacgtataccgcttcaaagatcgtcaacagattgaggtcaatattacgcaggatgcgaaacatttgacgatcgtaacgttcatcctgtctgtcaggagattctgacggaggcgtattctctggcacgcgatgagtccggttgggaatgataggccaagtatagcggcccaccgcgttgccgtgcgtgacaattgattgcaaaaataacgtgttactcgtttagcgccccgctgacagcgggacgttggcctgccgcttaatcccggggaagatattcgtgtggtggatgatttagcagcgccagcagattggcgaccagtcgcggagcgaccgtctccggggaggctgccggctgccactggcgcatttgcgtcatctccataccggcatagccgcaggggttgatacgcagaaacggtgtgagatccatggcgatattaagcgccagaccgtggaaagaacaacctttacggatccgcaatcccagggagcagattttgcgttcgccgacatagacgccaggggcatcggcgcgggggtgcgactcgatactatattcagccagggtattgacgaccgtttgctccagcagcgtcaccagctcccgcacgcccagcttacggcgcttgaggtccaacaggacgtacatcacctgctgtcccggaccgtgataggtgacctggccgccgcgatcgctctggatcaccggaatatcgccgggcaccagcacgtgttccgctttgccggcctgaccctgggtgaatacggggtgatgttccaccagccagatctcgtcgagggtatcttcatcacgggcgtcggtaaattcatgcatcgcctgcgagacgggttcgtaaggttgcaggccaagctgccggataagaattttattgtgctgcaaaacaacatctccgccgggaagagagaattcaggttggggagtatatcacagccgtgcagaagggaatgagaagacccggcacggcggccgggtcagggaaaaggttacagcaccatccgaacgatatcgatattgcctaactcttcgtacagcgtttccacttgttcaatgtgggtggcgttgatggtgatggagaccgagtggtagttacctttgctgctcggttttactgacggcgagtaatcaccaggcgcatggcgctgtaccacttccaccacctgatcaaccagctccggcaacgcctgccccattactttgtaagtaaatggcgtagggaattcaagcagttcgttaagtttggttttcatgtcagctccggtgttacgacaaaataataactcccaccaagggcgggagttatcaggttacttggatgaatagtatatggggatggaaatcacactttcaagtgttcgatttttaaccaaaccagtggtggaacattaatttaatgtaatcaataattttgccgaagaaattaccttccggaatttcctgcaggaccaccagcggacgctggtcgatggttttaccatccaactggaagttaatggtgccgacaacctggtttttctgcagcggggcgtgcagctcagtgttattcagcacgtagctggctttcagatctttcattcggccgcgcggaatggtcaggtagacgtctttatccacccccagcgaagcgcgatcgctgtcgccgaaccaggccggttcagaggcaaactctttgccagctttaatcgggttgacggtttcgaagaagcggaagccccaggtaagcagttttttgctttctgactcacggcctttgaacgtccggccgcccattaccgcggagatcaggcgcatctggccttcggtggcggaagcgacgaggttgtaacccgctttgtcggtatggccggttttgatgccgtcgacgttcaggctgttatcccacagcaggccgttacggttcagctggcggatgccgttgaaggtgaactctttctcacgatagatggagtactcgttcggtacgtcgcggatcagcgcctggccaatcagcgccatgtcgcgcgcggagctgtactgtccgtcagcatcaagaccgtgaacggtctggaaatgggtgtttttcaggcccagagcgtttacgtagttgttcatcaggctgacgaaggcgtcctggctgccggcgacgtagtcggccatcgccacgcaggcatcgttaccggactgcaggttaataccacggatcagctgagaaaccggcacctgcatgcccggcttgaggaacatcagagaagagcctttgaaaaccgggttgccggtggcccaggcatcgttgccgacggtgaccagatcggactctttgaatttgcccgctttcatcgcctgaccgataacatagctggtcatcattttggtcagactggccgggtcgcggcgggagtcggcattgttttcagccagtaccttgccagagttgtaatcgataaggatccaggattcggcgtcaatctgcggggcgcctgggatcatcgttttgatattcaggtcatcggcgcgggcagcggaggagagcgctgcaacggagagcgccgtaatgagtaaacgagcggtgaaagaggtcttcatggtcagaacaacggcatccgtgatggagttaaaaaagtgccttactatagcaaatgctctgcgggccagcatccgacattgcgcatgagtttgttaatgacttttacatgcgcgaggtgaacgggcggcccgcggcgtttagttggcgcgagtaataaaggactgcagctgcgcttcgctttgcaggcgctgctgcacggcgctggcctgtgctttatcagcaaagggacccagctgaatacgccagaccgcgccgttttgcatgacccggcctggcacagaaaactgctggctcaggcgctgctgatactgctgcgcccgcgtctggtcgcttactgcgcccacctggacaacaaaattaccgctggcgctggaggtcgcggaggacgaggccgccacggcgccagcggctgcggcggtggccgcagcgggcgccacattaccctgaatggagccaggcgcggtcactggcgctgttggcgtggcgccggcggcaggagccgtcgcggcggctgccgctggttcgctactctccagcacgccgttgttcaggggcgtcggcgcgccgaggaaaccgccgctgttcaccggcgcgcccacgctgtctgccggcgtcagcgtgctgttgctgatcgggcgaacgtcagtgggtgcgggttggctcatgccagcggcgtccccaccgtccagattcggacgggcgggcagggcgtaagtctgtttggcgacggtggtacaggccatccccgggccggaaagcgaaccgtcaggcgcgacgatgatggggtcgatgcgcactttggtgttgttggaggtgttcaggcggtcagcggatgcgcgggaaagcgagatgacccgatcgttgccatagggaccgcgatcgttaatccgcacgacgatcatccgtccgttggcaaggttagtgatccgcgcgtagctcgggatcggcagcgtcgggtgcgctgcggtcaactgagtcggatcgaaggcttcgccgctggcggtcaggttgctgttgggttctgcgtcatagatcgccgcgaaaccggcctgagtaaagttggccggatcctgaacgattttgtagcttttaccgtcgcgctcataatcctgattcgccgtggcgttcggcgtttcatactgcggatcggcgccgctgatctcaaccgtcgggccattacagacggccggctgtggagtactgaccgttttttgttgcacgtcatcactcgaacatgccgccagcagccccgctgctatgcagatccccagccattgcttacgcattgctaacccctttaaacgcttttcgacaacatttttctgtgggtatggatcgacattacgataccaaacccggccatcagtacgatcagggcggagcccccgtagctcaccagcggcaacggtacgcccaccaccggtaaaataccactcaccataccaatatttacgaagacataaacgaataaaatcaacattaaaccaccggccatgacccggccaaaggtggtttgcgcctgggcggcgatccacagtccgcgcataatcagcagaatataaagcgctagcaggatcagtacgccaatcaggcccagctcttcggcgaggacggcgaagataaagtcggtgtggcgttccggcagaaactccagctgcgactgggtgccgtgcagccagcctttgccgcgcagaccgccggagccaatggcaattttagactgaataatgtgatagccggcgcccagcgggtcggtttccggatcgaggagcatcatcacgcgctgacgctgatagtcgtgcatcaggaagaaccacaggatcggaataaaggcggcgaccagcaccacggcgataccaatcaggcgccagctgaggccggagaggaacagcacaaacagcccggatagggcgatcaggatcgaggtcccgaggtcaggctgcgccgccaccagcagcgtcggcaggaagattagcaccagggcaatgccggtgttcttcagcgacggtggacagacatcgcggttaataaaccgcgccaccatcagcggcacggctattttggcgatctccgacggctgaaagcgcacaataccgagatccagccagcgctgcgcccctttggagatggcgccgaaggcgtcaacggctaccagcaggatgatacagaaaatatagaggtagggcgcccagccttcatagacccgcggcgggatctgcgccatgacgatcatgatcaccacgcccatggcgatctggccgattttacgctccatcatgccgacatcctgaccgctggcgctccagataaccagcgcgctgtaggtcagcagcgccagcaggatgagcagcatggtggggtcaagatggattttatcccatagcgattttttgttcggattatccgtcattattgatcctcccctgcggttaccgccgggttttcgcttggcagcgtagtgttgttatcgcccagcatgatgtgatcgaggatctggcgcataatcgtaccgaccgccgggccggcgccgccgttttccagaatcatcgccacggcaacctgcgggttgttataaggcgcaaacgctgtcatcagtttatggtcgcgcaagcgctcggagatccggtgcgcgttataggtttcgttggccttcaggccgaacacctgagcggtacctgacttggccgcgattttatacggcgcgctggcgaagtatttgtgcgcggtgccgttgccgcggttggccacgccgtacatgccgtctttggcgatttcccaatagccggaatggatatcgcctaccggcggctcatggggctggacccagggtacgggcttgccgtcttccacggtgctctgcagcagatgaggcaccttcaccacgccgtcgttaatcaggatcatcagcgctttgttcatctggatcggcgtggcggtccagtaaccctggccgatgcccaccggaatggtgtccccctggtaccagggtttcttaaagcgcttgagcttccattcgcgggtcggcatgttgccagagcgctcctcggagaggtcgataccggtgtagtggccgtagccaaacttgctcatccactctgagagacggtcgatgcccatgtcataggcgacctggtagaaataggtatctgcagactcctcgagcgctttggtgacgttcagatggccgtggccccactttttccagtcacgatagcgtttctctgagccaggcaactgccaccagccggggtcgaagaggctggtgttgcgggtgatcaccccggcgctcagcgccgagacggcgacgtacggtttgaccgtcgacgccggcggatagaccccctgcgtcgctcggttgaccagcggtgtgttcgggtcgttgagcagcgcggagtaatctttgctggagatgccgtcgacgaacaggttcgggtcatagctcggggttgaaaccagcgccagaatagcgccggtacgcgggtcggtcaccaccacggcggcgcggctgccggccagcagcgtttcaatatactgctgcagcttgaggtcgagggtgaggtaaatgtcgcgtccggcctgcggaggcacctctttcagctgacgaatgacgcggccgcggttgttcacttcaacctcttcgtagccggtctgaccgtgcagaacgtcctcgtaataacgctctatacccagcttaccaatgtcgtgcgtcgaggcgtagttggccagcttgccctctttatccaggcggtcgacgtctttatcgttaatttttgagacatagccaatgacgtgagtcagcgccgaattataggggtaataacgacgcttgtagcctttgacttccacgccgggaaagcggtactggttgacggcaaagcgggccacctgcacttcgctgaggttgacctttaccggaatcgaggtaaaacgatgggagcgggcgcgctcctttttgaaaccggcgatgtcatcgtcggttaaatcgacgacgtcgcgtagcgcatccagcgtctgctgtacgttatcgactttctccggcatcatctccagctggtaaatggtgcggttaagcgccagcggggtgccgttgcgatcgtaaataatgccgcggctcggcgggatcggcaccagcttgatgcggttttcgttcgagcgcgtctgatagtcgtcgaagcgaacgatttgcacattgtacaggttggcgatcagaacgccggtaagcagcaaaatccccaaaaaagcgaccagcgcccggcgcacgaacagcgaggattcagccgtatagtcgcggaaagaattctgtaatttcattcgctgcttagtctaccctgatcatcattactcacggtggtacgggtggttggtggtgatgctccacgcccggtacagactctcggccaccagtacgcgcaccagcgggtgaggtaaggtgagggtggagagcgaccaactctgttccgccgctgctttacaggcgggagagagaccttccggaccgcctaccagtaaactgacgtcgcgcccgtcctgtttccagcgttccagttcgcgcgccagctgcggtgtatcccatggtttacccggaatatccagggtcacgatgcggttcttaccggcagcggctaacatcatctcgccctctttttcgaggatgcgtttgatatcagcgttcttaccgcgcttaccggcagggatctccaccagctcgaacggcatatctttgggaaaacggcgcagatactcgctaaagccggtctgtacccagtccggcattttggtgccaacggccaccagctgcaacttcacgcattaactccagagtttttccagctcgtacagacgacggctctcttcctgcatgacgtggaccatcacgtcgccgaggtcgacgacgatccagtcggcggcggcttccccttcaacgcccagcggcagcatgccggcggcgcgggactcctgaaccacgtggtcggcgatagacatcacatgacgcgtggaggtgccggtgcagataatcatgcaatcggtgatgctggatttgccatgtacatcaatggcaacgatgtcctgacctttcaggtcatcaattttgtcgataacaaaatcctggagtgctttaccctgcaagtgttccccctgggtgcgtgaagattgataatcataaagagcctgacagtatacctgaactgttgaaaaagtcgggtgaaatgtctgtcggcaggcgttcgtggcgggctatcatcccatcccttgccgcggattgcatcgccatttttgtaaaacaatttctgcaaaccggctttggcggatgctgcctggcagcggagaataacagcctgctctggcctgtcaatggtctggcgggaattcttcttgcggccgccagacggcctggctatttaatacccgcagggtggtgaaatcgtcgcggatttcgaggaggctccaggcgccatgggcaatgggaaagtgccacatcgccgccgcaggcatctgcaacagcagggcggtcagcaggctcaggacgccctgatggccgacgatcagcagatggtcaagatggcggcagtcggtcagcgttgggataaactcgctgacgcggcgggcaaaattctgaaagctttcgccgttggtgggggccgcatgctgccagtcggcacaccaggcggcatagttttccgcatcttctcgctggaggtcgcgatgatgacgcatctcccagtcgccgaaaaacatctcattgagcgcgggatggcgctcacgcggaatagcgcggtcgccaagcagcagatcggccgttgtcccggtccgcgccagctcgctacagaatactttatcgaaaggcgccaggcgcagccgttcgccgagcgcgcgcgcctgagcgacgccgcgcggcgtcaggggcgttggggcatggccgctgtataacccggcaacgttggcttcggtttcgccatggcgaactaaccacaatttcatgaacaggctctgacaggcgatgaaaagatggcgttacgatagcgcttttttcgcgccaggcccagcctggggtcagcaatagagtccctgctcgcggatgtaatccagcacggcggcaggcagcatctcggcgcaggactcgccgcgctcaaggcgctggcggatgatcgtcgcggaaatatcgaaccacggcgtctcagccaggtagatcacgccggaagggctgttatgcagagactccacgtcgtgggttaaatggcgatccagccagcgctgatccgcttcctgcgccatggtcagcgggtaacccgggcggcggcaaacaatcaggtggacattgtcgagaatggtttcatagttgtgccaggtgggaaaggtcagtagcgaatcctggccaatgataaacgccagcggtttgcgcggcccctgctcctggcgccactcctgcagcgtttgcgccgtccaggagggggtatcgcgccgtagttcgcgttcatcgagcgtgaacagcggtttatcggcaatcgccagcttcagcatgtgcacgcgctgggcgctggtggcttccggctgcggccggtgcggcgggacgttgttaggcatgatgatgaccttgctcaggccaatctgattcgccaggatctcaaccggcttgaggtgaccgtaatgcaccggatcgaaggtgccgccatagattgcctgtaactgagtcatatcaaccatcaataaaaacgtccgccagggctttgtggcagagcaacaacgaaagactttccagttcgggccagacgtcgtgcccgtaatcctgtttaaaggtgagctccgcgcgggtcagaagggtcaccgcctggcgcagctgttccccgctcaggcgcgtgagggcgtcgctgagcagctgacggcggttttgccagacccgatgtttatcaaacagcgagcgcagcggcgtgtgcgtcgcctggcgcttgagggtaaccagcagcagcagctcccgctgcagagtacgcagcaggatcgccggctcgcagccttcaaggcgtaactgctgcaggacgtgcagcacgcgcttacttttgcctgccagtagggcatcgacccaatggtaaggcgtaaagtgcgcggcatcgtttaccgcttgctcaacgcggggcagggttagcttaccgtccggccagagcagcgccagacgctccagcgcctgcgccagcgccagcagattgccttcgtaacagtagcacagcagctgactggccgcgtcgtcgagctgcagctgatgctgtttggcacgggcggccagccagcgcggcagctgcgcgtattccggcgtctggcaactgacctggacggcgcgctgagccagggcggtgagccatgcggcattctcctgggctttggacagcttatttccgcgaactatcagcagcaggtcgtcgtgcagcaggccaaccagcgtggcgagctgttcattgatcgccgcgttggggccgttttccggtaggatcaatagcagggtttgccggctggcaaacaggctcatcgcctggcttaaggcgaaaatcgcctgccagtcggtgctgttgtcgattgaaaaagtatggtgctcggtaaagccctgcgcggcagcagcttcgcgaatggcgtcctggctttcctgcaacagcaggggatcgttgccaagcagcagataggccgcgcgcagcccttcagtgagctgcgcgcggagctgttccgggtacaaccgaatcatcattgacccagcgtggtggagacgcggttacccgaggaagccggcgccgcgctgctggcgaccggtttctcttcctgctgggttgcttcaacatccgctacctgaacgcttggcagcttacgaatcagctgttccgccgctttgtcgtacatttcctggataatcatatcctgctcggcgtctttcgctaatgccgcctgcgggttatcaaagaacgaccggtagaccttggtggtaatcggatagatatcgtgacccgggatcaggacgctggcatgaacggtcatgaccatctgatactccgccgtacgaccatcctggaacaccgatgcggtatctttctgaatcgacgagccatcgaggcgcagagaagggacatctttacgcagcgtgctggcgtcgatcagttccacgccgttaagacgcagctgattacgtaccgcgcggcttaacgggccgttcggatcgctcgactggaaaatcatggttttcatggtggcgggcaccttggtagtgctacgcaaatgccagccacagccggcggtgacgagcaccgccagagataacaacattgttaccagatatcgcacgcttcctcccgcgcttagccaacgaccagattgagcagtttacccggaacgtaaatcactttacgcacggttttaccgtcgagatatttcgccaccagatgttcctggccggcgcgctcgcgaacctgctcttcagttgcatctaccgcaacggtaattttaccacgaactttgccattgacctggacgacgacgagggtgctgtcttccaccatcgcgctctcatccgctaccggccacggcgcgttgtcgatatcgccttcgccgttcagctcacgccacagggtgaagctggcgtgcggagtgaacgggttgagcatacgcaccaccgccagcagagcttcctgcatcagcgcacgatcctgctcatcttcctgcggcgctttcgccagcttgttcatcagctccatgattgccgcgatggcggtgttgaaggtctgacgacggccgatgtcatcggtcactttggcgatggttttgtggatatcgcgacgcagcgctttctgatcttcgctcagagccgccacgttcagtgccgcaacctctcctttagtggtgtgctcgtagaccagtttccagacgcgtttcaggaagcggttcgccccttcaacgccagattcctgccactcgagggtcatatccgccggggacgcaaacatcatgaacagacgcacggtatccgcgccgtagcgctcaaccatcacctgcgggtcgatgccgttgtttttcgacttggacatcttgctcatgccggtgtacaccagctcgtggcccgccgcgtctttggccttcacgatgcggcctttttcgtcgcgctcaacgatggcgtcaaccggggaaacccagttacgttcgccgttttcgcccacatagtagaacgcgtcagccagcaccatgccctggcacagcagctgtttcgccggctcatcggagttcaccatgcccgcgtcgcgcatcagcttatggaagaagcggaagtagagcaggtgcatgatggcgtgttcgataccgccgatgtagatatctaccggcagccagtagttggccgctttcgaatccagcattccttcctgatactgcgggcaggtgtagcgcgcatagtaccaggaggattccataaaggtgtcaaaggtgtcggtttcgcgcagcgccggctggccgttgacggtggtcttggcccattcaggatcggctttgatcgggctggtgatgccgtccatgaccacgtcttccggcaggatcaccggcagctgatcttccggggtcggcagcacggtgccatcttccagggtcaccatcgggatcggcgcgccccagtagcgctgacgggatacgccccagtcgcgcagacggtagttaactttacgctcgcccacgcccatggcagccagtttgtcggcaatggcgttgaagcccgcttcataatcaagaccgctgaactcgccggagttaaacaggacgcctttctcggtcagcgcctgctcggagagatccggctcggagccgtcggcagcgaggataaccggcttaatgttcagaccgtacttgctggcgaactcgtagtcgcgctggtcgtgacccggaacggccattaccgcgccggtgccgtattccatcagcacaaagtttgccgcccagaccggaatttcttcaccggtcagcggatgaatggctttaaagccggtatcgacgccttttttctccatcgtcgccatgtcggcttcggccactttggtattgcggcactcgtcgataaaggtggccagcgccggattgttcgccgcagcctgctgcgccagcgggtgacccgccgcgacggccaggtaggtacaacccataaaggtgtccggacgggtggtgtagacagtcagtttgtcagcgtagtcgttgacgtcaaaggagatttctaccccttccgaacggccgatccagttgcgctgcatggtcttcacggtgtccggccagtggtccagcttatccagatcgttcagcagttcatcggcgtaggcggtgattttaataaaccactgcgggatctctttacgctcgaccttggtatcgcagcgccagcagcagccgtcgataacctgttcgttggccagcacggtctggtcattcgggcaccagttcactgcggaggtttttttgtacaccaggccttttttgtacagctcggtgaagaacttctgctcccagcggtagtattccggggtgcaggtcgccagctcgcggctccagtcatagccgaagcccagcattttgagctggtttttcatgtaggcgatgttgtcgtaggtccacggcgctggcgcggtgttgtttttcaccgccgccccttctgccggcagaccgaacgcatcccagccgatcggctgcaggacgtttttgcccagcatgcgctggtagcgggcaatcacgtcgccgatggtgtagttacgcacgtgacccatgtgtagtcgaccagaaggataaggaagcatcgacaggcagtaatacttctctttgctctcgtcttcagttacttcaaatgtacgattttcgtcccagtgaagctggactttcgattctatctcttccgggcggtattgctcttgcatggcagccagtggtcctgttttcaatacagctacaaagtgtagccaatggatgtgttatttcagatcggcatagcatagcccaaacgcccacgtcaaaacagcttttcgcacatcaacatcggcaaaagctgcgcagattatttcgcgactctgtggcttgtcagacacagcgggagaggaataaggtctattatcagaagacgttaaccccaccggaggcgaaatgatgaacaaggttgctcaatattaccgtgaactggtctcctcgctcagcgaacggctccgccatggagagcgcgatatcgacgcgctggtgacgcaggcgcgggaaaaaatcgtccgcgccggcgatctgacgcagagcgagatcgagtcggtgattgcggcggtcaagcgcgacctcgaggagtttgcccgcagctacgaagagagtcacgaagacgagagcgacagcgtgtttatgcgggtgatcaaagagagcctgtggcaggagctggctgatatcaccgacaaaacccagctcgagtggcgggaagtctttcaggatctgaatcatcacggcgtgtaccacagcggcgaagtggtcggtctgggcaacctggtctgcgagaagtgccactatcacctggcggtatacaccccggacgtgctgccgcgctgtccaaaatgtggccacgatcagttccagcgtcggcccttcgagccctaagcgtgcgaaaaacgatgcgcgaggcttcgcgcatcgtggtttgtcttatttcaccgtgttgacttcggtgctcttgaaatactgttttccacccatgtcgctaacatatttctgcgatgagttcagtaccagcttgtcagcagttaacgtcccgacgccgcatttcgccaggcccaggatgccgcaacttttaccaccattgaccactttggtggcggttaacgtcatgttgccgcccgcgctgagggttgaataattgtagatcgcgcctttatttttggtatttaaggtcaggtcgccggtgctgctgatctgcccttcgttggtgatatctgagtaggtcgtgattgaaatatttttggcagtaatattgccataattattcactacgccgtgatcggtggtgatatcggcggcattcatataaccattttggttcagccagtagctgtgggcggtaatggcgttggttgcctcaatacgaccactgctgctttgcgccagcgttccattggtctgcagattgatattttcgccggtgatattgccgaggttatagatctcgcccgtattggcgctgccgtcctgtgtaagcgactgaatggtggtttggccagtagagttaatattgccggtgtttttaaagctgtcgccgacaaacgtcaggctggtgtgtttggcgctgattttgccttcattgaggaaatcaccgattgccgtggcggcaatctggttatttgacagcagggaggctttttcttcgttgcggattttcccgccgctggtcaggcttaatccactggtgccggtcatcgtgcctgagtcgccgttggtgatgttgccgttagcggtggcaatcagctggccgccggagagagaaccggtgttaacgatataatcgccactggagagcattaaataataggcgccggcgatgctaccgtcattggtgatgcccgtgacggtggaaacctggctcagcaaacctttgcccgttattgaccctttgttcagtaaattaccgttgctggtgagcatcagcgtgccgttggagataatagaacccttattacgtacgccaaagccgatgttattgccgaccatgctgatgctgttggcctcaatgccgccaaggctgctgacgtcgatgctgtactgcgggttaaccgtcatctggatcagggtggcctttttaccggcggaggtcaccgagccagagctgttatccatggtgaagttgcccgcgctgaccagggcgttgttggcctgcactttaccgttaatcttaatcgcgtcggcgagcagaaccgcgtagccgttggcggcgttcatgccattttcgccgatggtgagggtgcctcccgttacggtatagctgccgatggcgccatcgtcggtcatattaaccttgccggtggtcaggatagccttgttggtattaacaaagctacagccggaacaggtgatgccgttcgggttggcgattaccacatccgctttctgaccgttgacttcgataaagcccttcaggctactggcgtttttggaggtcacctcgttcaaaatcaccgaagcgctgccggcggtcagattattgttgcgggcgatattgccaaatgtgctgtggctgacatcatcgccgctgttattgaggatggtgccattggcgccgacgttgaagtcgcggtacaggttatgggagacaccggcggcgttcggcttttcaatatcgataaccgtggcgccggaagagtgcgtatagcttgtggggtcggcataaactaccgacgaggttaatactgccgccagtgcgacataagaagccttaaacttaaacattttctttattcctttaaataatgattaataaataatgtaaatatgacgagtcaataatgtgcgaattaatacctccactgtaatgaaaagcccatattcagggcgtcgctatgaaacttatccggtttactcagcggggtactaataaacagatcgtactgcgttgaccatagctgaccgcgcagcccgctgacggcgccggagagcactttgcctttttgatatagatcggcgccgataaggcggcctatatccgcgcccaaatagaattgccgctcgtgggtggccagatcccagataaaatcattgcgccagtaccatccctgattgccggacaggctgttttcaccgtcaaaaccgcgcacgctccagcgactaccaatattgaatttattatcggaagcgagtttgtccgggctgaactgggcgctgaggcggggagcccaggtaaatttgtcgccggtggcgtcaaatttcatcattgcctgcagattaccatgcacaatccgcgacagcgggctatacagcccggcctgctcttccggcgttgctgtcgagctgagccacggcaggctgcgctggatgccgatgctggcatcaacaatctttttgttaaagtagtgctggtggttgagggtgaattcccatgaggggttctgcttgcgcatcaccagtagctcactgccgccgaagtaataatgcgaggtgctcttggcgatccgcaggtcagcggtggttttttgctgccgggtgtgggagagcagacgactcagcgtggcgctgtagtagcgatttttactcttataatccatcgtcgaccagttgccgttaaactgctgacgatactggctgtatgccccgtaggcgcttagtgtccagtagccaaagggaatggagtaatacaggctgccgttgtggttgccgtcgttatgctgattgaattcaatatcgcccccgccggaaaggtacaggatatcgttgagggtggtcaggtcatagagatagagggccccgccggcctggtagcgtccgctggctttgctgccggcgtcgtcaagccaggcgccaagctgccattttttcgccaggctgcgggcgatctggatatcgctttctccctcgtgctggcccggcagcagtttcatgtgcgcggtggcgccgggcagacgctgcaggttggccatcccttgctcaaggtcgcttaagcgcaggatagtaccggaagaggtgggcagggaattccacaggcgggtggtgtccgagccgtcggcatagtcgatagcgcccactttgccatagtgcagcgtgaacctgagtatgccgtgctccagcgactgggagggcacatcaatcagcgaggtgatgtagccttgcgcgatcagctcattttgcaaggtataggccagcaggcgaatgccttcgctacccagacagcgtccctgcgcctgccgtgcggttttcgccagtaatttccgggtgagcgcctggttatcggagtcgatatcgacccggttgatcaatttgcaatgcgtttcctcaggaaaagggatcccctgcggcgccacgcgctgttgtgaagactgaaaatcctgttgctgcggcgccagcgcctcctggcgggctttatcctgctccgtctggtgagtagaagaggccaatggcgcggccccggcggctgaggtgcccgccagcgtgataaacagcagcccggtgagcgtgcgagatcgaattaacatgaagcaatatccatttgtttcattggtttggtggcgcatccattattctgcgagcggcagagaatatcgatggcctttatttcggcgcaggcgaggtcaggcaagaatattatattcaattaataaaataatcatgcgacgaacctgttacgaggcgttatatgctagcggcggtggcaatgccggtccacgaattcattattgaattctttatgaattgatcgatttaataaataagttcagcttttatcggcgaggtttattgggtacgtaaatgatagtagcgataatctgccgcataaataacattggcgaataatatggcggaaaagattaactgcgcataccgggcggtatgcgcagagaaaaaacattaatgaagtattttggcgaggaaatctttggcacgctcggattgcggattggcaaagaaggcctctttatcggcatcctcgacaatcttcccttcatccataaagatcacccggttcgccaccttgcgggcaaagcccatctcatgggtcacgaccatcatggtcatcccctcgttggccagttcgaccataacgtccagcacctcgttaatcatctccgggtcaagcgctgaggtgggctcatcaaacagcatggcgattgggtccatacacagggcacgggcaatggccacgcgctgctgctggccgccggagagttgcgccgggtatttttccgcatgcgccgccaggccaacgcgctccagcaacttgaggcctttcttgcgcgctgaggctttatcgcggttaagcactttgacctgcgccagcgtcaggttgtcgataatcgacagatgcgggaacagttcaaaatgctgaaacaccatgccgacgtgcgagcgcagtttagccaggttggtctttttatcgttaaccacggtgccatcgacaataatctgcccctgctgtaccggctcaaggccgttcacagtcttaatcagcgtggatttaccggagcctgacggcccgcagaccaccacgacttcgccttttttcacttccgtggagcaatcggtcagcacctgaaagtgaccataccattttgaaacgtttttcagggtaatcattacacagtccttttcttcaaccagctgaccaacagcgaggcgctgaggctaatcacaaaatagacgccgcccgcgaacaggatcatttcgacctgggttccgtcacgctcgccaatggtggaggcggtacggaagaagtcggcgagactcaatacatacaccagcgaggtatcctggaacaggacgatcccctgggttagcagcagcggcaccatggcgcggaaggcctgcggcaggatcaccagccgcattgactgccagtgggtcatccccaacgccagcgcggcgctggactggccgcgggagatgctctgaatgccggcgcggataatctctgaatagtaggcggcttcgaacatcgaaaacgccaccatcgccgagatcaggcgaatatccgttttcggcgacagtcccagcacgttctgcaggaagcccgggacaatcaggtagaaccacagcaggaccatcaccagtgggattgaacggaatacgttgacgtaggatttagcaaaccaggccagcggcataaagctggacaggcgcataaccgccagcagggtgccccagacgatgccgaccacgatggcgatcaccgtaatcttaagggtgatcaccagccctgccagcagatagggcatggagggaacgatcgaactccagtcaaaatcgtacattatttgcctcccatattgccaggcaggcgaaccttacgctcgaccacatacataatcagcataatcaccgcgttgatgaaaacataggccagggtgatggcggtaaaagactcccaggcatgagcggagtagtccagcagtttgcccgcctgcgcggccatatcggccagaccgatggtggaggcgatggccgagtttttcaccaggttcatcatctccgaggtcatcggcggcacaataacgcggtaggcgttcggcagcagcacgtagcggtaggtttgcggcagggtcaggcccatcgccaggccggcgttcttctgcccgcgcggcagcgactggatggcggcgcgtacctgctcgcagacgcgagcggcggtaaacagccccaggcacagcatggaggagacaaagaattgaatgtttgggtccagctccgatttaaaccacatgccgatattttccggcaggaactccggcaccaccaggtaccaggtaaagaactgcacgatcagcggcacgttgcgaaacagttcgacatagcaggtgccaatgcccgagaggaagcgattgggtaccgtgcgtaaaatgccgaacagtgagccgacgagaaaagcgatgatccaggccgagatggagagggcgacggtgatttgaaaaccgctccacagccagcccaggtaggtagtgttgccgaagggggcctgttgcaggaatatcccccagttccagtctattgacatacatgactcctggaaaaaaaagggtagccagtgctaccctcgaagacggttgtccagcttgtttcggtattcgcggcggctggggaacgaccagccgccgtatagtctgtccgtgctgtgacaatcatcgggagggcaggatatcccgcccctggttgttataattagttcagtgctttgtcgttaggtgatttgaacagcgctttcatgtcgtccgacagctcgaagttgaggttaagattttttggcggaatcgggtttttgaaccatttgtcaaaccacttctccgcttcgccagaggtctgagcctgggcgacggtttcatcaaccagcgccttgaacgtcggatcgtccttccgcagcatgcagccataggcttccttcgactgcggggtgccgacgatttcccaattatccggtttcttcgccttggcgcgttcgccagccagcagggcatcatccatcataaaggccacggcgcgtccgctctccagggtgcggaaagagtcgccatgatctttggcgctgataatgcgcatattcatttttttctcatcgttcagcttatgcagcaggatctccgaggtggttccggaggtgacgacgaccgctttatccttcaggtccgggaaatctttgatcgggccgcctttcttcaccagcagacgggtaccgaccacgaagatggtatcggagaaggccgcctgtttctggcgctcaaggttgttggtggttgagccgcactcgaaatcaaaggtgccattctgcagcaacgggatacggttctgcgaggtgaccgggatcagtttgacctgcagatcgggtttgttcagttttttcttgatggcatcgacgatggcgttggaataatcctgagagtagcccacaaccttctgctggttatcgtagtaagagaacgggaccgaagattcacgatggccgacaacgataaccccgtttttggcgatcttatccagggtgttctggccagccgccggggcagcatcttccgcctgcgccagaccagcggtcattcccattaccagcattgccgtggccagtttacgtaattgcatatccaactccttatccgcagcgtcagcgacgctattgatacccattgtgattgtgtgtgttgttattgggggcacgcgtccacgtgccgcatttgtatgtgtttgttagcatttagtttggcttaatgtaaagattttgctgctttattgtttatttttgcgaagcgctccgcaccaatcggaggcaaatatcttccattgcaccaaaatagcgcgaccaccgatcgtttctggtgcaacctggttgcactgggtcggacgatgccgctaccaggttaaataaagcaatgactgtgccagagtggcagatgatgggaagaaaaagccggcgacgggcgtcgccggcggagaaacttatcggcgacgctggcgcaggctcatcagcagcgcggcgaaaccaaacagcgccgtcagcgcccatagcggccagttgccggtgcgggcgtaaggggttaagccgctggcgggggtcacggtggtggtcaacacctcgcgggtaaactgcgggatcatcttctggatctcgccgcgcgggccgatcaccgcagtaatgccgttgttggtgctgcgcagcagcgggcgggccagctccagggcgcgcattcgcgccatctggaagtgttgccacgggccgatggacttgccgaaccaggcgtcgttggagatggtcagcaggaagtcggtgtccggccggaagttatcccgcacctgttcaccgaggattatctcgtagcagatggccgcggtcagcttcaggttatgcgccatcagctgcggctgcacgtaggggccgcggctgaaggaggacatcggcaggtcaaagaacggcgccagcggacgcagaatcgactccagcggtacaaactcgccgaacggcaccagatggttcttgttgtagcggttggtcgagtcgtagcggtacgggttatctttgccgagagtaatgatggtgttgtaggtatcgtaacggttctgcttgttgagacgcgcatcgacaatgccggtgatcagcgagctgtcttttgcgcgcagcagatcgtccatcatgctgaggaactgctgctggttgatctccagatccgggatcgccgattcaggccagataatcagctgcgagtggccgatatgcggctgggtcagcgccaggtaggttttcagggtattgaccagctgcttttcgtcccatttcatggcctgtgggatatcgccttgcaccagcgagacctgggtcgcgcgcgccggcagcagctgataccactggatatagcgcagcgggaacggcagggcgaacagcagcgcggcaatcgccagcggcttccagttgcgctggacgagggccagggccagcaggccgctgactaccatcagcaagaagttaatcgcctcgacgcccatcaccggcgcgaggcctttcagagggccgtcaatctggctgtagccgaactgtagccacggaaagccggtcagcacccagccgcgcaggaactcggtgatttgccagacgacaggggcagcgatagccatccgtatccagttagttttaggccacagacgggcgagcaggccggcaaacaggccggtgtagagcgagagataggccgccagcagaacgacgaggaagacgttaaccgggccgggcattccgccaaactgagcgatgctgacatagacccagttgatacccgtgccgaacagcccgagtccccagaaatagccgatcccggcgctttgcagcgggcgtcggttgagggttaacgcctgcagaccgatcagcgaaacgatagccgctggccagaagtcataaggtgaaaaagccagcgttccgctggctccaaacaacagcgccagcaacagacgtacgcgctggcgttcaagaagagaggcaaataccatttaggttaatcgtcccgttaattaacgcctgctgctacaggctattctttttgccagccggacgcggggctcctacaaccgtgtatgactcgcggtctcccggctggccatttcagcgctaccgcttactcttccagcttcggctggggagcgtcatcgggcagctttacatgcacctgaatgatacgacgactatctgccattgctaccttgaattggtaaccatcaatgtcgatagattcgccgcgggccggcagatggccgaaggcctgcatcaccagcccgccaatggtatccacttcttcatcgctaaagtgcgtgtcgaaggcgtcgttgaagtcttcgatggaggccagggcgcgcaccgtccaggtgtggcggctcagctggcggaaatcgatatcttcttcttcgtcgtactcgtcttcaatttccccgacgatgagctcaaggatatcctcgatggtcaccaggccagagacgccgccgaattcgtcaataacgatcgccatatgatagcgctgtgagcgaaactctttcagcatgcggtcgacccgcttgctttccgggacgacaaccgccggccgtaacactttttccatgctgaaggcttcggcgtcgctgcgcataaacggcagcagatccttggccatcagaatcccttcgatgtgatctttatcttcactgatgaccgggaaacgcgagtgggcggattcgatgatgacatccaggcactcgtccagcgtctggttgcgtttcagggttatcatttgtgaacgggggatcataatgtcgcggacccgctggtcggcgatatccattaccccttcgagcatgtcacgcgtatcttcatcgataaggtcgttttgcccggaatcacggatcagcgccagcagttcatcgcggtttttcggttccccgtgaaaaagctggctgagtaacagggagaaaaatccctttttgctgtttactgtgtcactactgtgtgaattgtcgtcgctcatggcgtcgtttgggttctcatgttgatttaactgtcgctcgtcgcgcgtaaactcagcgccggacggcatgggttgcctgactttctggcaggtaaaacgcagaaacagcggccggatgaggcgcaagcaccgccatccggctgggcgctattccgcaatcttctcggaaatgtacgggtcctcatagcccagagcaagcattatctctgtttcaaggccttccatctcttccgcttcgtcgtcttcgatatgatcgtagcccagcagatgcaggctaccgtgcaccaccatatgcgcccagtgcgcctccagcggcttaccttgctcgctggcttcctgctctaccacctgacggcagatgatcagatcgccgagcagcggcatttcaattcccggcggcgcttcaaacgggaaggagaggacgttggtcggcttatccttgccgcgataggtcaggttcagctcatggctttctgcaacgtcgaccagacgaatcgttaactctgactcctcctgaaacggcggaatgacggcgtcgacccagcgttggaaaagggcttcgtccggcaggccgctggtctcttcgcaggccagctgtaaatcgaggatcacctgactcatttttgctcctgttcctgggcttcgcgtttgcgctcggcggccagctctgctttacgtttctggtctgcggcttcccatgcctcataggcgttcacgatgcgggcgaccaccggatggcgcaccacgtcttcgctatggaagaagttaaagctgatctcatcgacttccgccagtacttcgatggcatggcgcagaccggatttggtgctgcgtggcaggtcaatctgcgtgatgtcgccggtgatcaccgccttggagttaaagccgatgcgggtcaggaacatcttcatctgttcgatggtggtgttctggctttcatcaagaatgataaaggcgtcattcagcgtccgtccgcgcatataggccagcggggccacttcgatgacgttacgctcaatcagcttctccactttctcaaagccgagcatctcaaacagcgcgtcatacagcgggcgcagatacgggtcgaccttctggctcagatcgccgggcaggaagccgagcttttcgcctgcctcgacggccggacgggtcagcagaatacggcggatctcctggcgctccagcgcatcgaccgccgccgccaccgccagataggttttacccgtacccgccggacccacgccgaaagtgatgtcgtgatcgaggatattggcgatgtactgcgcctggttcggcgtacgcggtttgattaccccgcgcttggtcttgatattgacggctttaccgtactcaggcacgctttcggcgctctgctccagtacgcgcgcttccttgatcgccaggtggatctgctctggttcaatatcctgaatctgaccgcgcattggcgctgtgtcgacatacaggctgcgcagaatatcggcggcagcgtgcacgcacagggcgcgaccggtcagcttaaagtgattgtcacggcggttgatctcaatgcctaaccgacgctccagctgtttaatgttgtcgtcaaacgggccgcacagggctaacaggcgtgcgttatccgctggctccagggtaatctcacgagtgtctatgttcaaactattcctctttacgcaggtggccggacgcggcgcgtggccggctaatcaggaaattatttacgtcacaggaaaatggcgcaagcattgctgtagatatagggacggagagaggaattacaaggcctgccggaaccgacaggcctgaagggatcatggctggtaaattcccacgccaagatcgttctctttacgggtgcgggcaatcactgattcgggtgattcagcgatacgcagacccatctccgcttcggtgcgcacgattttaccgcgcagcgagttggtgtatacatcgacgatttcgacatcgacaaacttaccgacgaggtccggggtaccttcgaagttgaccacccggttattctccgtacgtccggaaagctccatgatgttcttacgcgaggtgccttccaccaggatgcgctgtaccgtgccgagcatgcgacggctccaggccatcgcctgctggttaatgcgttcctgcaggatatacagacgctgttttttgtccgcctccggcacgtcgtcgaccatatcggccgccggggtgcccgggcgagcggagaagataaagctgtagctcatatcgaaattgacgtcggcgatgagcttcatggtcttttcgaaatcttccgtggtttcgccggggaagccgacgataaagtcggagcttatctgaatatccgggcgcgcttcacgcagcttgcgaataatcgctttatactccagcgcggtatgggtgcgtcccatcaggttcagcacacggtcggagccactctgcaccggcaggtgcaggaagctcaccagctccggcgtatcgcgataaacgtcgatgatatcgtcggtaaattcgatcgggtggctggtggtgaagcgaatgcggtcgatgccgtcgatggcggcgaccaggcgcagcaggtcggcaaagctgccggtggtgccgtcgtaattctcaccgcgccaggcgttaacgttctgccccagcagattgacctcacgcacaccctgcgccgccagctgggcgatttcaaacaggatatcgtcgcacggacggctaacttcttctccgcgggtatacggcaccacgcagtaggtgcagtatttattgcaaccttccataatcgagacaaaggcggtcggcccttcggcgcgcggctctggcaggcgatcgaatttttcaatttccgggaagctgatatcaactaccggactgcggttgccgcgcacggagttaatcatctccggcaggcggtgcagggtttgcggcccgaaaataatatcgacatagtgcgcgcgctggcgaatatggtcgccttcctgggaagccacgcagccgccgacgccaataatcaggtccgggttcttctctttcagcagcttccagcggccaagctgatggaaaactttttcctgggccttctcacgaattgagcaggtattgagcaacagcacatctgcttcttccgccacttcggtcagttgatacccatgtgtcgcatccagcagatcggccatctttgatgaatcatactcgttcatctgacagccccaggttttaatatggagtttttttgtcattgacttgctcatgctcagtaatagatatccaaaacgcggggatatatacagggtgaatttcgcattccagggcgcgtattgtaatgctttggtcgccccctgaccagtgcgagcgttatcgccgcaagagggcgaaaaatccggtaaacttaacggattctgctttaaggataatagccatgacaattcacgtaacagatgtcgccatcgtgggcggcggcatggtcggcggcgccctggcgttagggctggcgcaacagggatttaccgtgacggtgcttgagaaagcggcgccaccggcgttcgatccggcatccgccccggatgtgcggatctcggcgatcagcgcggcttcggtcggcctgctgaagagtctcggcgtctgggatgccatacgggcgatgcgcgtccatgcttatcgccgtctggagacctgggagtgggagagcgcgcacgtcgccttcgacgccgcggagctcaagctgccggagctgggctatatggtcgagaacaaggttctgcaatggggcctgtggcaagcgctggcggcgcatgaggcggttaccctgcgcgtcggtagcgaactgaaaacgatgcagcgcggcgagacgcagacggcgttgcatttgcgcgagggggagacgatccacgcccggctggttatcggcgccgacggcgctaactcccaggtgcgggagatggccggcatcggcgtgcacgcctggcaatatcagcagtcctgtatgctgatcagcgtcgaatgcgccgacgatcccggcgacagcacctggcagcagtttactcccagcggcccgcgcgccttcctgccgctgttcgaccactgggcctcgctggtctggtacgacgccccggcgcggatccgtcagctgcagagcatgaccatggcgcagctccagcaggagatcgccagtcactttccggcgcggctgggacgggtgacgccgcaggcggccggcgccttcccgctcacccggcgtcatgcgctgcagtatgttcagcccggcctggcgctggtgggcgatgcggcgcacaccattcatccactggcggggcagggggttaaccttggctatcgtgatgtcgatgccctgctggagatcctggcggaagtgcgcggccgcggcgaagactgggccagcctgccggtgctgaagcgctaccaggcgcggcggcgagcggataattttatcatgcagtcggggatggacctcttttatgccggtttcagcaatgacctggcgccggtgcggatgctgcgtaatattggcctgatggcggctgaacgcgccggggtgctgaagcgtcaggcgctgaagtatgccttaggcttgtaaaaccggcttcccgggcaggggcgtagcggagagcgcctgcccggcagtcagtacggagtaagcatgtcaggacgccaatagcaaaaaagcccaccgaagtgagcttttttgcattgaaatggctggggtacgaggattcgaacctcggaatgccggaatcagaatccggtgccttaccgcttggcgataccccaattgtctgttgcgcttgaccgtaactatgccggttgagtgcaacagtgcgttcactgctgaacgacttttaaatttggctggggtacgaggattcgaacctcggaatgccggaatcagaatccggtgccttaccgcttggcgataccccaacaaattgtttgcggatttatcgatgcgtatcgatacgtccagaatttggtggctacgacgggattcgaacctgtgaccccatcattatgagtgatgtgctctaaccagctgagctacgtagcctaattgtcttactgcttcttcgatggctggggtacctggattcgaaccagggaatgccggtatcaaaaaccggtgccttaccgcttggcgataccccaataccgtcgcggtgaaccgcaaatatcgaagaaatatggctggggtacctggattcgaaccagggaatgccggtatcaaaaaccggtgccttaccgcttggcgataccccatccgtacaacgctaactggtgaatggtgcgggaggcgagacttgaactcgcacaccttgcggcgccagaacctaaatctggtgcgtctaccaatttcgccactcccgcaaaaaagatggtggctacgacgggattcgaacctgtgaccccatcattatgagtgatgtgctctaaccagctgagctacgtagccatctttttttcgcgtaaccttatcggcgttgcggggcgcattatgcgtattgggcctgcgagcgtcaacctctttttcaaggaaaatcgttgtaatgtgactgtttggttaggttgcgaacagctcgctggaatattcggcaattattggttatttatcgtttttcagcggtataaatccggcaaaaagaaaacggaccccggagggtccgttttgcgtttcaccgcccgtctgggcttatttgtaggccgactggtggacaccgaccgcgcggcctgatggatcgttcatggttttgaacgcttcatcccactcaatggctttcgctgaagagcaggccaccgacggaccgccagggacgcactccgccgcgctcggcagcgggaacagctcttcgaagatctcgcggtacagatagccttctttggaggtcggcgtgttgtacgggaagcggaagcttgcggtttccagttgctggtcgctgatctgtttggcggccacttctttcagggtatcgatccagctgtagccgacgccgtcagagaactgctccttctggcgccaggcgacgctggccggcaggtaggattcaaagcattcgcgcagaatgtgtttttccattttgccgttgccgcacatcttatcctgcgggttaatgcgcatcgcgacgtcgaggaacttcttgtcgaggaacggcacgcgggcctccacgccccaggcggacatcgctttgttggcgcgggcgcagtcaaacatatgcagcgcctgcaacttacgcaccgtctcttcgtgcagttctttggcgttcggcgccttatggaagtagaggtagccgccgaacacttcgtccgaaccttcgccggaaagcaccattttgatgcccatggctttaattttccgcgacatcaggtacatcggcgtcgaggcgcgaatagtggtcacatcgtaggtttcgatgtgatagataacgtcgcggatggcatccagcccttcctggacggtaaagtgaatttcgtggtgcacggtgccgaggtggttggccacctcctgcgccgctttcaggtcaggagagccttccagaccgaccgcgaaagagtgcagctgcggccaccaggcttcgctacgctcctgatcttcgacgcgacgggcggcgaatttcttggtgatagccgagatgaccgatgaatcaagaccgccggagagcagcacgccgtaaggcacgtcggacatcaggtggcttttcaccgactcttccagcgcctgacgcagctcgttcttatcggtaacgttgtctttcaccgcgtcgtaatcaaaccagtcgcgctgatagtactggcgaatttcgccgtctttgctccacaggtagctgcccgccgggaactctttaatggtgcggcataccggcactagcgctttcatttcggaggcgacatagaagttgccgtgttcgtcatggcccatatacagcgggataatgccgatatggtcgcggccaattaagtacgcgtctttttcgctgtcgtacagggcgaaggcgaacattccctgcaggtcgtcgaggaactccgggcctttttcctgatacagcgcgaggatcacttcgcagtcggagccggtctggaactggtagcgatcgccatactccgcgcgcagcgcctggtggttgtagatctcgccgttaacggccagcgcatgggttttttcggcgttgtacagcggctgggccccggcgttgacgtcgacaatcgacaggcgctcgtgcgccagaatcgctttgtcgctggcatatacgccagaccagtccggaccgcggtggcgcatcaggcgggaaagctccagcgcctttttacgcagctcgcctgcgtcagttttaatatccagtacgccaaaaatagaacacatagccttctccattaccctgtcgtgtttgatgttgtgctggcttcgtctcgtggcgaagcctgagtgcgtgcttaagaaaatgccgtaaagggggagcaggcgcaaggggtttgcggccggaaaaagaaaaaacgcaaccgtgattgttgaacagtgaaaaaagagtatcttttgaacggctttattgaggaattcgtatttataggccgtttttattagatgaggtaattctgaagggcgctagaaatgaaaaaccacgtcctgcgacgtggttggcatcagaaaatatcgatttccgcgacggaagggtaaatccacgacgggcggaacggcatgctgtcgatgtcgtcgagggtggagacgccggagagcaccagaatagtctccagccccgcctggaaaccggccagtatatcggtgcgcaggttatcgccgacgatcaccgtctgctcggagtgagcctgcattttattcagtgctgaacggatgatccacgggctgggtttgccgacgtaaaacggcttacggccggagatcttctcgatcccggcgcaaagcgcgccgcaggcagggtagaagccgcgaccgtgcgtatccgggttagtggcaatgaagcgggcgccgttggcgacgaagaaggcggccttatgcatcatttcccagttaaaggaacgagtttccccgacgatgacaaaatccgggttcacatcggtaatggtaaagccggctttgtacagctcgtggatcagcgccccttctcccaccacgtaggcttttttgccttcctggcgacgcagaaaatcggcggtggccatcgctgaggtgtaaaaggcgctatccggaacatcaattccagcggtggcgaaacggttcgccagatcctggccggtttgcgacgggtagttggtcagcattaccagcggcatgcctttatcgaggatgcgcttgataaactcggctgcgccgggaacggcgacgttatcgtgcatcagtacgccgtcaatatcacaaattatgttttgaatggtcatggtgggtccagaatcattaacaaagacgaaactatacgcgtcatcgatgaggtttcacacctctgacgggcgaggcccgcccgtatcaaggtgacgcgctatcagaaaaggggcgattagctctcaagcaaacgctgcagcagcgtgccattgagcatggcgcgtttgaccagcgcgaaggcgccgattgcagagcggtgatcgagggtggagcgcaccaccggcaggttcttacgaaacgccttaagcgcctgggcgttaatgcagccttcgatggccggaagaaggaccttttcagcttccactatttcgccggcgacgacgattttttgtgggttgaacaggttaatggcgatggcgatcgttttcccgaggtggcgccccacgtactcaatcacctcgcaggccagggcatcgcccttgttggccgctttgcagatagttttgatcgtgcagtcatccggcgtcagacggctctggtagccctgctccagcaggtggcgaacccgctgttcaatggcggcattggccgcgacggtctccagacagccgaagttgccgcagtggcagcgttcgcccagcgggtcgacctgaatatggccaatttcgccgacgttgccgttgcggccgataaaaatgcgcccgttggagataatccccgccccggtaccgcggtgcacgcgcaccagaatggagtcttcgcaatcctggcttgcgccaaaatagtgctcggccagcgccaggctgcggatatcgtggccaacaaagcaggtaacattgaagcgtttctccagcgccccgaccaggccccagttttccaccgcaatgtgcggcatatagcggatcacgccgctttccgggtcgacgaggcccggcaggatcactgagatagcgatcagctcgcgaattttgcgctgacagttttcgataaaggtggcgatgatattcagcagggcgtgttccagcgtttcctgggtgcgctcgggcagcgggaagtgctcctcttccagggtcttgctgcttaaatcatacagggtcagagtggcgtcatagcggccaagccgcacgccgatggcgttgaagttgcgagtttctgcgatgatagagatagcgcggcggccaccggtggaggcctgctgatcgacttctttgatcaggccgcgctcaataagctgacgcgtgattttggtcacgctggcaggggcaagctggctttgttcggctatctgaatgcgcgagatgggcccatgctggtcaatcaggcggtacacggccgcgctgttcagttgttttacgaggtcaacgttaccaatttgagcttgtccgcctgctgtcatacttttacttactcagtgacgacctcgttaccattaacgatggtcttggtgattttataatcgcgtgtaaaggcggtcaggttagcgaccatgcccggcgcaatgctgccgagctgcttgtccacgccgatagcgcgcgcaggatagagcgtcgccatgcgcaatacttcgtccagtgccacgccgcaatgctcaaccagattacgcaccccttcaatcatggtcagggaagatccgctgagggtgccgttttcatctacgcacagcccattgcggtagtatattgttttcccggcaaaaatgaactggtcaatattcgcccccgccggcgcggtggcgtcggtgaccaggcacagcttgtcgcctttcaggcgcttggcgttgcgcacgttggcgtaatcgacgtgcatcccgtcgacgatgataccgcagtagacatccggctcgtcaaaaatcgccccggcaagacccggttcgcggccggtaatgtacggcatcgcattatacaggtgggtggcaaaggtaatgcccgcgcggaagccgactttcgcctctttcagcgtagcgttggagtggcccgcggagacaacgatcccggcggcgaccagtttgcggatcacttctggctcaacgcgctcaggggcgagggtcactttggtgatcacatcggcgttgtcgcacaggaaatcgaccagcgccgcgtccggtttacgcacgtagtccggattgtgggtgcctttcttaacgatattcagccacggcccttcgagatgcaggcccagcgcctggttcggatgtttttgcagatattcgcgcatcacgcgcacgccttgcttcatcagatcgtcgctggaggtaatcagcgtcggcaggaagctggtgcagcctgagcgttcgttggccttctgcatgatctccagcgtttcgacagtgaccgcctctgggctgtcgttaaactgcacgccgccgcagccgttgagctggacgtcgataaaaccgggggcgattattgcgccgttgactgagcgctgctcgatgtcagacggcaaatctgccagcggacaaagacgttcgataaagccattagcgataacaaccgcatggtcatcgagaatttcatgaccggtataaacccggccctgggttaatgcatacattacgacccccggtatatacgcctcatcaggtcagcgttcgttcgtttgccgccggcatgatggtgcgtacaaagaaaaagatgatcccgcgccagggcgcgggaaggactacattacagacctttaatattttcagcttctaattcgttgaaatatttcagcgtcttcactttcagctccatggtggacggttcgtcgcagacgatcaccgccttcggatgcagctgcagacaggtaatagtccacatgtggttgacgttaccttctaccgccgcctgcagcgccagcgctttctgatgacccagcaccagaatcatcacttcttctgcgtccagcagggtgcccacgccgacggtcagcgcatatttcggcaccagatccacatcgccgtcgaagaagcgggagttcgctacgcgggtttcatgggtcagggtcttaatacgggtgcgggacgccagagaagaggccggttcgttaaacgcgatatgaccatcgttgcccacgccgcccatgaacaggtggattttaccgtaggaacgaattttttcttcatagcgacggcattccgcatcgatgtccggcgcgttaccattcagcaggttgatattttctgccggaatatcaacgtggtcaaagaaattacggtgcataaagctatgatagctttccggatgctctttcggcaggccaacgtattcatccatgttaaaggtgacgacgtgcttgaagctaacctggcctgctttatgcatttcaaccagcgccttgtaggcggtcagcggggtaccaccggttggcagacccaggacgaacggacggtccgcggttggtttaaatgcattaatgcggttaacgatatggcgggcagcccatttaccgacctgctcagcggttaccaggggaatcagtctcattcttcacctctatagtcaaagtagattctggcggattggcgccagcactctaaggagagtattgcagcaactgcgccgaccggggtcaatccgtgttgattttttgaatgataaaataagttttcgttgttagccagtgcaagggaggagggaatacgatatttggtgataattatcacaaaaaatacccgtttaatttgcgatacgaattaatttttcacacactttgccggtaagtgataaaaccgaccttgttacacaataaaaaagtggctttgaaatgagcctcatcggggtctcatagggggaataagatgaatattttaggtttctttcagcgactgggtagggcgttgcagctccctatcgcagtgctgccggtcgcggcattgctgctgcgtttcgggcaaccagacctgttgaatgtacccttcatcgcgcaagcgggtggggcgatcttcgataatctggcgctgatcttcgcaattggtgtggcatcaagctggtctaaggataacgccggttctgcggcgctggccggtgcggtagggtatttcgtgatgaccaaagcgatggtcaccatcaacccggaaatcaatatgggcgtgctggccggtatcattaccggtctggtggcaggggcggtatacaaccgctgggccggcatcaagctgccggacttcctgagcttcttcggcggcaaacgcttcgtgccgatcgccaccggcttcttctgtctgatcctcgcggcgatcttcggctacgtctggccgccggtgcagcacgctatccactctggcggcgaatggatcgtctccgcaggggcgctcggttccggtatctttggtttcatcaaccgtctgctgatcccaaccggtctgcatcaggtgctgaacaccatcgcctggttccagattggtgagttcactaacgccgctggcgctgtgttccacggcgacatcaaccgcttctacgccggcgacggcaccgcggggatgttcatgtccggcttcttcccaatcatgatgtttggtctgccgggtgcggcgctggcgatgtatctggcggcgccgaaagcgcgtcgtccgatggtaggcggtatgctgctgtccgtggccatcaccgcgttcctgaccggggtaaccgagccgctggaattcctgttcatgttcctggctccgctgctgtacctcctgcatgcggtgctgaccggtatcagcctgttcatcgcaacggcgctcgggatccatgcgggcttctccttctccgcaggtgcaattgactacgtgctgatgtacagcctgccggccgccagcaaaaacgtctggatgctgctggtgatgggcgtggtgttcttcttcgtctacttcctgctgttcagcgcggtgatccgcatgttcaacctgaaaacgccgggtcgtgaagacaaagccgctgacgtggtaacggaagaagccaacagcaacactgaagaggggctgacccagctggcgaccagctatatcgccgcggtgggcggaacagacaacctgaaagccattgacgcctgtatcacccgtctgcgtctgaccgtgggcgattcggcgaaggtgaacgacgccgcctgtaaacgtctcggcgcgtccggggtggtgaaactgaataagcaaaccattcaggttatcgtcggtgcgaaagcagagtctatcggcgatgagatgaaaaaagtggttacccgcggcccggtagcggcagcggcagccgcaccggctggcaacgtcgccaccgcagcgcccgcggctaaaccgcaggcggtagcgaacgcgaagaccgttgagtcgctggtttcgccgattaccggtgacgtggtggccctcgagcaggtgccggacgaagccttcgccagcaaagccgttggcgacgggatcgcggtgaaaccgaccagcaacatcgtggtggccccggccgccggtaccgtggtgaaaattttcaacactaaccacgcgttctgcctcgaaaccaacaacggtgcggaaatcgtcgttcacatgggtatcgacaccgtggcgctggaaggcaagggcttcaaacgtctggttgaagagggcacggacgtgaaggcgggtgagccgattctggaaatggatctggacttcctcaacgccaacgcgcgctcaatgatcagtccggtcgtctgcagcaacagcgatgactacagcgcgctggtgatactggcgagcggtaaggtcgttgctggccagacgccgctgtatgagattaaaggcaagtaaggctcctgagtcgagtttttgcctcagcggcgaagggaaaccttcgccgcttttttttccagcaatcggccccataatcctcttctgatacctattttacgtaactaatagttgtcactacgccctgcttgtaagatcatgtgccgttatacgttgtttacgctttgaggaacccgtgatgagtgaggcagaagcccgcccgactaactttatccgtcagattattgatgaagatctggctaccggtaaacataccaccgttcacactcgcttcccgccggagccgaacggttatctgcacattggccatgcaaaatccatctgcctgaacttcggcatcgcccaggattatcagggccaatgcaacctgcgtttcgatgacaccaacccggtgaaagaagatatcgaatacgttgagtcgattaaaaacgacgtgcagtggttaggtttccactggtccggggacgtatgctactcgtctgattatttcgatcagctgcatcagtatgcggttgagctgatcaacaaaggtctggcctatgttgatgaactctctcctgatgaaattcgcgaataccgcggcaccctgaaagcgccgggtaaaaacagcccttatcgcgaccgcagcgtggaagagaacctggcgctgtttgaaaaaatgcgcagcggcggcttcgaagagggcaaagcctgcctgcgcgcgaagatcgatatggcgtcgccgtttatcgtgatgcgcgatccggtgctgtaccgcattaagttcgctgagcatcatcagactggcaacaagtggtgcatctacccgatgtacgacttcacccactgcatcagcgatgcgctggaaggcattacccactcgctgtgtaccctggagttccaggacaaccgccgcctgtacgattgggtgctggacaacatcagcatcccggtgcatccgcgtcagtacgaattctcgcgcctgaatctcgaatacaccgtgatgtccaagcgtaagctgaaccagctcgtgactgagaagcacgtggaaggctgggacgacccgcgtatgccgaccatctccggtctgcgtcgtcgcggctacaccgccgaatccatccgtgagttctgcaagcgcatcggcgtgaccaagcaggacaataccatcgagatggcgtcgctggagtcctgcattcgtgaagatctgaacgaaaacgccccgcgcgcgatggcggtgatcgatccggtgaaactggttatcgagaactatccgcagggcgaaagcgaaatggtggtgatgccgaaccatccgaacaagccggaaatgggcagtcgtgaagtgccgttcagcgccgaaatctggatcgatcgcgcggacttccgcgaagaagccaacaaacagtacaagcgtctggtgctgggtaaagaagtgcgtctgcgcaacgcctacgtcatcaaagcggaacgcgtggagaaagatgccgaaggcaatattaccaccatcttctgcacctacgatgccgacaccctgagcaaagacccggccgacggccgcaaggtcaaaggcgtgatccattgggtaagcgcggcgcatgcgctgccggtagagatccgtctctacgatcgtctgttcagcgtgccaaacccgggcgcggcggacgatttcctcgcggtaatcaacccggaatcgctggtgatcaaacaggggtacgcggagccgagcctggcgcaggccgaagccggtaaagcttaccagtttgagcgtgaaggctatttctgcctcgacagccgctatgcaaccgcaaccaatctggtgttcaaccgcaccgtcgggctgcgtgatacctgggcgaaagcgggcgaataacatttcttttctgtcaaagcgtcgctcccagcggcgctttttttgtttcagaatcagctaattaaacttttcattttcgcgatgcgaattaattctgtttctgcgcggtaataaatagcgcttctgatgtttcctgtcacatacaaaaaaccaatgtaatcgctttcaatgattgcgtttttccctgattttgcaatgacttccataacaaaatcatcagagataagactgtaacaaaacgacataaaatatgtgcgctttgtcataatcttaagctttgcctcacgaaaaacattgataattcgcgtcacgaaaaatagtctatctatagtggtttcgcggtcttttttaccgccccacattttgcagttttatttattttttagcgattgaccgctggtcttcgccttttaaaacgtcaaagaggatatgcacatgcgtacgtttagtggcaaacgtagtacgctggcgctggctattgccgccgtcaccgcgatgtcgggctgggttgtggctccacaggccagcgcagcaggctttatcgatgattcaaccttaaccggcggtatctattactggcagcgtgagcgtgaccgtaaagatgtgaccgacggcgacaaatacaaaaccaacctttcccactccacctggaacgccaacctggacttccagtccggctatgccgccgatatgtttggccttgatattgccgcgtttaccgcgattgaaatggcggagaacggcgatagcggtcacccgaacgaaattgctttctcgtcacgtaacaaagcctatgacgaagactattccggcgataagagcggcatcagcctgtataaagccgcagcgaaattcaaatatggtccggcgtgggcacgtgcgggctatatccagccaaccggccagactctgctggccccgcactggagttttatgccaggtacctatcagggggcggaggccggggctaacttcgactatggcacggcgggcgcgttaagtttctcctatatgtggacgaacgagtataaagcgccatggcatatcgagatggacgatttctatcagaacgataagaagaccaaagtcgattacctccactccgtcggcgctaaatatgatttcaaaaatgacctggtgctggaggcggcatttggtcaggctcagggctatatcgatcagtactttgctaaagccagctacaagtttgatgtcgccggcgcgccgctgagcaccagctaccagttctacggcacccgcgataaggtcagcaacggcggggtcaacgacatctatgatggcaccgcatggctgcaggcgttaacctttggttataaggtggcggatgtcctggatctgcgtctcgagggaacctgggtgaaggctgatggccagcagggctacttcctgcagcgtatgaccccgacctacgcctcttccaatggtcgtctcgatatctggtgggataaccgctccgactttaacgccaacggcgaaaaagcggtcttctttggcgcgatgtatgacatgaaaaactgggatatgccgggctgggcgttcggcgcgtcttatgtctacgcctgggatgcgaagccgggcagaatgtcctctccggatgcgtactatgaccctgactatcgcctgaaagagtcggcctatagcctggatgcaatgtataccgtacaggaagggcgggcgaagggcaccctgttcaaactgcactttacccaatacgacaaccattccgatattccgagctggagcggcggctacggcaacatcttccaggatgagcgcgacgtgaagttcatggttatcgccccgttcactattttctgatgcctgagcggcgggcgtgagcctgccgcacctctgggaaaacgacaatgaaaaaaatgctgcttattgccatgatggcagcgggcctggtggcctgcaccacgtcgccggcgccgaaagaagacaccaaactgaaagatgcctatagcgcctgtattaatacggcggaagggaatccggacaagattgaagcctgccagagcgtactgaatgtgctgaaaaaggataaacagcaccagcagttcaccaaccaggagagcgttcgcgtcctggattaccaacagtgtattcaggccacccgcaccggcaacgatcaggcggtgaaagcgcgctgcgatcagatctggaaagagatccgcagcaataatacgacccattaaatcagacgacagcggcaaacgggcggggcatatctccgcccgtttgtttttttgcgctgactctccgccggctgatagccgcggctcagccgcacgaacagtagcgcggtggcaatgaatccgcacagcgcggcgcacattagccaccagcccggcgggcttttatcgccggtgagctcgaccagtgcggtggaaatagctggcgtcaggtcgccgaaaatggcagtagcgagactaaaggccagcgaaaagcccacggtgcggacgtgtaccggcatcacttcggtcagcgccgcgaccatcgcgccgttatacatgccaaagaagaacgagaaccatagcaggaccagcgtcatacgggtgaaatcgggcgcgacggtgagccagtgcatcaccggccaggtggtgagcagggccagcacggtaatgcccatcagcaccggacgacgaccgatccgatcagagatcgccccgctggcgaagttccatatcaactctccggacaaagcggggatgaggaaagtcaccccaggggcgtgtgcgggaagggtgccagaggcgcccataaaaaagccaaccggcaggttggcttttcagtctcagcgaaacggggaattatttttccaccgcgtcgtgggcgtgttcgtcctcgcggcaatccccttccgcacagtgaccgtacagatataaactgtggttggtcaggcggatgccgtggcgggaggcaatttcacgctggcgtaattcgatcgagtcgtcgctgaattcgatcactttgccgcagtcgaggcagatcaggtgatcgtggtgatgctgctgggtcagttcgaaaacggattttccgccttcgaaattatgacgagtcacgatgccggcgtcatcaaactggttgaggacgcggtaaacggtcgccagaccgatctcttcgcccatgtcgatcaggcgtttatataagtcttccgcactgacatgatggttatccggttcctgcagcacttcaaggatttttagtcgaggaagtgtgactttcaggccagccttctttaatgcggtattgttgtcagtcatgcggaatctgtcctgttgctaaacgatctacttccttcaacggaagtcatacagaaattaacccgacgtaatgcgtctcattatagaactgccactggtaaatgaaaactgcaagcatcaggcctggtttgctgtcaaaaacgaggcaccagctacaaactgcgtcacgtgcctcgtagaatcagaggacattgtacagatatgtgattaaaagttaaaaacttgtagctattagtttgattgcttttgtctattaatgcggcgcaactcaatgattgcgccgcttaatcatcaggcgtttttgatttcttcgaggtgcagctcttcggcaacctgcttcacccatttctcaacgcgctcgttggtcagctccggctggcggtcttcatcgatggcgaggccgacgaagtggtcgtcatccgccaggcctttggaagcctcaaaatgataccccgccgttggccagtgaccgacgatggtcgcgccgcgcggctcaatgatgtcgcggatggtgcccagcgcgtcgcagaagtattctgcgtaatcttcctggtcgccgcagccgaacagcgccaccagtttgccattgaagtcgatctcttccagcgtcgggaagaagtcatcccagtcacactgcgcttcaccgtagtaccaggtcgggataccgagcagcaggatgtcgtgggcttccaggtcttctttgctgcttttggcaatgtcgtgaacatcagcaacatctttaccaagctgcttttgaatcatttttgcaatattttcggtgttgccggtgtcgctgccaaaaaagatgccgatgattgccatgagtaaaataacctcttgaaacttaaatgatgtggtagggacgcaatgcccatagataacggcaatcatagcagaacaggcaagggcgcggaaacagcaatcacgcccgactgcacactctgctacatgaatgcgggtttttcgcggaaagttagacttttccctggctgcgcagggcggttaactgggtcatcagcatctcttcaatgagatcgctgcggctcatattacgcgcttccgccagctcgttgagcgcatcgaccgcatcggcgttgagttttaactccacgcgcttcagcccgcgaaccttatcgcgtttcagctggttacgtttgttgatgcgcagttgttcatcgcgcgacagcggattggttttcggtcttcccgggcgacgctcgtttgcgaacaaatctaatgtcgtacggtccgtttgttcttttgccatgattctgagtgacttcggggaaacaagctgccgggctctagccggcgcagatagcgcgccatcatacatcaggcgaacggctgcgccaacgaccgtgggcattctgcggcgcggtcgggcatattttagccaatcaggcggcgatgctcgtcagatagcggcggatggcgcgtaacaccgcctcgggtttctcggcatggacccagtgtccggcgccggcgatgacgtgggcccgggcctgcgggaactgggccagcagcgcgtcgcggtaggcgtcggtcacatagggcgagttgccgccgggaataaactgcgtcgggtgcggccaggccgggatggtttcccagccgacgatatgcggatactggtcccacagcaccggcacgttgaagcgccagtcgccgtcgacgaatgatttcagcaggaactgaatcacgccttcttcctgcaggtgctcgcgcatcacctgcgccgcctgctggcgggtgctggcggcggattcgctgacggcgcggatagcggcgaagatctcatcatggcggcgaacgtgataatccaccggcgcgatatcgatcgccaccagaccgctgatgcgttcaggcgccagggcggtaagcgccattaccgctttcccgcccatcgaatggccgataaaggtggcgcgctcgatctggtgcgcgtcgagcgtatcaagcagatcctgcgccatggcggggtaggtcatctctggcgaccgcggcgacaaaccgtggttgcgcatatcgacctgcacaatatcgtggtcggcgatcaggtcgcgggcgaggatgcccaggttgtccaggctgccaaacagaccgtggaccagcacgatcggggagtggttgtgcggattctgtgcagattgcgctcggctatttaatttcatggcaaagttctttttttcgctccgtcgggttagggtattatgttggacattctgccatccggctgcaagacccagaagttttctgagttttaccgccatcctggtttgacgctatccgcggttgggatttgtacttataatcccaacgatttgtattcagaaaagatatcgcactggattaagatgaaaacaattgaagttgatgatgaactctatcgctatattgccagccacactctgcatatcggcgagagcgcatccgacattttacggcgtatgctgaaattttccgccgtttcccaaccggctacaccggtcagcaaagccgcgccgacgctggcgccagcgcctgtcgctgaggtgaaacccgctaacccggtgaaagataaagtccgcgccatgcgcgagatgctgttatctgatgaatacgccgagcagaagcgcgcggtgaaccgttttatgctggtgttgacgaccctctactccctggacagtaaagcatttgccgaggccaccgagtctctgcacggccgcacgcgcgtttacttcgcggaagatgcgcgtacgctgctgaaaagcggtaatcagaccaaaccgaaacaggttcctggtacaccgtggtgggtgatcaccaataccaataccggccgtaaatgcagcatgattgagcacatcatgcagtcgatgcagttccctgcggagctgattgaaaaggtttgcggcacgatctagctttttaacatttgcaccagaaggatcaggcaatggcaatcgataaacgtgcggggcagcctgcgcaacagagtgatttgattaacgtcgcccaactgactgctcagtactacgtgctgaagcctgaagtcggtaatgcggagcatgcggtaaaattcggcacctctggccatcgcggcagcgcggcgcgccacaacttcaacgaaccgcatatcctggccatcgcccaggccattgcggaagatcgtgcgaaaaacgggatcaccggtccgtgctatgtcggcaaagatacccacgccctctccgagccggcgtttatttcggtgctggaagtgttaaccgccaacggcgtcgacgtgatcgtgcaggaaaacaacggcttcaccccgacgccggcggtctccaacgcgattctggtgcataacaaaaaaggcggtccgctggcggacggcattgtgatcaccccgtcacacaacccgccggaagatggtggtatcaagtacaatccgccaaacggcggcccggctgataccaacgtcaccaaagtggtggaaaaccgcgccaacgaactgctggccgcgggcctgcagggcgtgaaacgcatttctctggacgcggcgctggcttctggccacgttaaagaacaggatctggtgcagccgttcatcgaagggctggcggatatcgtcgatatggccgcaatccagaaagccggcctgacgctgggcgtcgatccgctgggcgggtccggtatcgaatactggaaacgcattggcgagcactacaagctcaatctgaccattgttaacgatcaggtggatcagaccttccgctttatgcacctcgataaagacggcgccatccgcatggattgctcctcagagtgtgcgatggccggcctgctggcgctgcgcgataagttcgatctggcgtttgctaacgacccggattacgaccgccacgggattgtcaccccggcggggttgatgaacccgaaccactacctggcggtagcgatcaactacctgttccagcatcgtccgcagtggggcaaagaggtggcggtgggtaaaacgctggtctcctccgcgatgattgaccgcgtggtgaacgatctgggccgcaagctggtggaagtgccggtgggctttaagtggtttgtcgacggcctgttcgatggcagcttcggcttcggcggcgaagagagcgccggggcctccttcctgcgcttcgacggcacgccgtggtccaccgataaagacggcatcatcatgtgcctgctggcggcggaaatcaccgcggtgaccgggaaaaacccgcaggagcattacaacgaactggcggaacgcttcggtgcgccgagctacaaccgtctgcaggcttccgcgacctccgcgcagaaagcggcgctgtccaagctctctccggaaatggtcagcgctgacaccctggcgggggatccgatcactgcccgtctgaccgcggcgccgggcaacggggcggcgattggcggcctcaaggtgatgaccgacaacggctggttcgcggcgcgtccgtcaggcaccgaagacgcctacaagatctactgcgaaagcttcctcggcgaagagcatcgcaagctgattgaaaaagaagcggtagagattgtcagcgaagtgctgaagaacgcttaacgacgcactaccatcaggccccttgcgggcctgatttttttcgcaaggatagcgatgaaaatacaacggaagtccctgtttttgttctgggcgtggatggatctctttttcgtcctgcaattcttatggtggaatattgcccaccgccgcctccctttttacgacgatctgctggcttatctccagctgctgcacacctggggctccgcggcggtctggctgtacccgctgaatgttctgctgattatcagcatcccgctatcgatgatcttttttttccgccagagccgctatgcgctgtggctggcctgggggcaggcgccgctcaggctgctgtttatgcagccttcgctatcgctgggcctgtggctgattcaggctgccggcatcaggcatgtagcgatcctggcaggctttctgctgctctctgaagggctgaaaatcgccagcctctggtactgcagaggcgggattcagggcataaagcgatagccaatcccggtttcggtcagcaaatgctgcggccgtgccggatcggcctccagcttttgtcgcagatgacccatatagatccgcagatagtggctgtgctccacggcgttaggcccccacacctgattcagcagctgacgctgggtaagcactttgccgggattattcaacagcgccgccagcaggcgaaactcgataggcgtcaggtggatctcttcgctgccgcgcaggatgcggcgggcggggatattgacctccaggtcagcgaagcgcaccaccggctcatcggcctgcgccgcgccatggcgacgcagcgcgacgcgcaggcgggcctgcagctcgccgatgccaaagggtttacttaagtagtcatcggcgccggcatccagggcggcaattttgtcatgctcttcgctacgcgctgacaggacgataatcggcatctggctccactgacgcaggtcgcgaataaaatcaatgccgtcaccatccggcaggccgagatcgaggatcgcgaggtcgggcttacgggtggcggcttcaatcagcccacgctgcagggtttccgcttcaaatacgcgcatgccctcggcttccagcgcggtgcgcagaaagcgtcggatagcgtgttcgtcttcgataatcagaacgttaatcacaattcctcaggtagctcttccagttcagggggcgtttctccaggcagtgtaacacggaatgaggcgccgccctcgggccggttgctggcggagatggtcccgccgtggacgtcgacgatggcctgacagatggcaaggcccagcccgacgccagggatcgccgactctttgttgccgcgggcgaatttatcaaagatagtctgttcctggcctgccgggatccctggaccgttatcccatacctccagcgacagctgccgggcgtccgcctcggcgcgaatgccgatgctcgcccgggcgccggcatacttatgggcattttccagcaggttgatcagcacccgctcgaacagcggcccgtcgacatgcaccagctggaggggatcgggtaaatccagctgaatatgctggccgccgaggcttggctcgagcatgcgcagcgcgctgccgaccacttcctccagcgtcagccactccttatgcagattgaagccgccggactggatccgcgccatatccagcaggttgttcaccagccgggtggtgttgagcacatgctggcggatttcgttggcctgcggggcatgttttgaaccttcgctggccagatcgagggtcagaatttccgcctggccaaacagaacggtcagcggagtacgcagatcgtgcgacagggcggcgagcagcgagttacgcaggctttcccgctcgctggtcagacgggcctgctcttcgctggcggtcagggtgaggcgctccagagcgctggccaccagcaaggtaaaggtctccagcagccgctgctgctccgggatcatcaattggcgcagattctccggttccaccaccagtagtccccaggtgcgggcggcgctcttcaggggcaagatctgatacggcacgccgggcagggtatcggtgccggcgccggcaggttggcccttatcaaagctccagcgggcgatggcatcatcccacggggtcagccctggctggtgggttaagggcagcagttttccctgggcgtccgggagcagcagctggctgcgggcctgaaaggtggaggcgataaatcgctcgctggtggtggcgatatcctgctggctgcgacccaccgccagcgctttagacatctcatacagatggcgggtacggcgttcacggtagcgcgccacccgcgcctggtagcgcacgccggcggtgaggttgccgataagcaggcccacggtgagcatcacgccgaaggtgagcagatactggacatccgacaccgccagcgtcccgcgcggggcgacaaaaaagagatcgaagctgatgacgttgatcaccgtcgccagcaccgacggccagcggccatagaccagggcgatgagcaccacccccagcagatagagcatcaccaggttggcggcttcgaaggccatcaaccactgcatggccaccagggtaatgatggcgcatagcgccaccgccaccgcgcagccctgcagctgcaggcgccatttctccagcgccgtacggctgtcgttgccccgcgcagggagaggggacggtttttcatcgagggcgatcaccaccagatcgaggtccggcgcatggcgagccagacgatcggcgaagccgctgcgatcccacccgcggcgcttgctttgccggccaatgacgattttgccgaggttatgttcgcgggcgtaatggaggaccgctttctcttccgacgggtcggagagggtggcggtttcggcccccagctcctgggccagacgcagcgcggcgagaatagcccgccgccgggcttccggcagccggtgcagggaaggggtctcgacatacaccgcatgccagacgctgcccaggcgggcggcgagccgggcggcggcgcgcaccagcttttcgctgccggtgttgtgcccgatacagagcaggatcgcatcgcgggtgtgccagactttctcctggccctggcggtcgcgccaggcgcgcatctgctcatcgacgcggtcggcggtgcggcgcagggccagctcgcgcagcgcaatcagattgcccttgcggaaaaagttttcgatagcgcgctcggcctggccgccgatgtagactttgccctcattgagccgctggcgcagatcgtcaggggggaggtccaccagcaccacgtcgtccgcggcgtcaaagaagggatcgggaaccgtctcccgcacctgcacgccggtgatcccgctgacgacgtcattcaggctttccagatgctggacgttaacggtagtgaaaacatctatcccggcctccagcagttcatccacatcctgccagcgctttggatggcgggagcctggcgcattgctgtgcgccagctcatccaccagaatcagcgccggacggcgggcgagggcggcgtcgagatcgaactcatagacgtaccgcccacgatgggcaagccgccgcggcggcagggtactcaggccctgcagcatcgcggcggtctctttacggccgtgggtctccgccacgccaatcagaatatccagcccctgggcgcgcagccgctgcgcttccgccagcatcgcccaggttttccccaccccggcgcaggcgccaaagaacactttcagtttgccgcgatgcggggcggcggtgtgctgcagcaggcggtcagggtccgggcgcagcggctcgtcactcatttacttatccttcagggcatccagcgccatattgagttgcagtatattgaccaccggctggccaaggaagctcagcagcggggtttgtgtggcctgattcaccaactgggttacctgctcaacgctcagctggcgcgcttgagccacccggggcacctgccacagcgcggcggccggagtcaggttgttatcgagaccgctcgccgaggtggtgaccagttcgaccggcacccgcgggtcggcgtccgggttggcagcgcgcagggcctgcacgcgctcgctcaccgctttatccagcgccgggttgctggcggcgaggttgctgccgccagaggccatgggattatccgtcgtctccgcggtggccgacgggcggccctggaaatagcctgcggcggtgaagttctggccaatcagcgccgagccgcgcacttcaccgttcaggcggatcagcgagccgttggcctgtgagttaaaccaccattgtcccaggctggtggttagcagaggatagacgccgccggtgagcagcgttaacagaataaatagcacaagtgccggacgaatcaatgacatagtttgttcctcacaccagaccgctcagggtcagcagcaggtcgatggctttaataccgataaagggcaccagcagaccgccgaggccgtagatccacaggttgcggcgcagcatcgccgaggcggagagcgggcgatagctgacgcctttcagggccagcgggatcagaaagacgatgatcagcgcgttgaagataacggcgctgaggatcgccgatgagggcgaatgcaggcccatcacgttcagcatggccagctgaggatagaccgcggcaaacgccgccggaataatggcgaaatatttcgccacgtcgttggcaatactgaaggtggtcagcgagccgcgcgtcattaacatctgtttgccgatatggaccacctcaatcagcttggtggggttggaatccaggtcgaccatgttgcccgcttccttcgccgcctgggtgccggagttcatggccaccgccacgtcggcctgagccagcgcgggcgcgtcgttggtgccgtcgccggtcatcgccaccagccgaccttccgattgatactggcggatcagcgccagcttggcttccggcgtcgcttcggcgaggaaatcatcgacgccggcctcggcggcgatcgccgcggcggtcaggcggttatcgccggtgatcatcaccgttttaatgcccattttgcgcagctgggcgaaacgttctttgatgccgcctttgacgatatctttgagcgcaataatccccagcaccttttccccttcggcgaccaccagcggcgtggccccctggcgggcgacctcttccacctgtttatcgacatcggcagggaagtggccgccgttggcctccacgtggcggcgaatggcgtccaccgaccctttgcggatcatgcgctgatcgatattgatgccgctcatccgcgtttgcgcggtaaaggggacaaaggtggcgtgcagcgactgcagatcgcgttcgcgcaggttaaagcgctgtttcgccagcaccacgatgctgcgcccctcaggggtttcatccgccagcgaggagagctgggcggcgtcggcgagggttcgctcttccacgccgcgcgccggcaggaaggctgaggcctggcggttgccgagagtaatggtcccggttttatccagcagcagaacatcgacgtcgccagcggcttccaccgcacggccgctggtggcgatcacgttggcgccgagcatacggctcatcccggcgacgccgatggccgacagcagcccgccgatggtggtcgggatcaggcacaccagcagggcgaccagtacggtaacgctgaccgcattgccgctccacgccgagaagggccagatggtggcggtggccagcaggaacaccagcgtcagggcgatcagcaggatcgtcagggcgatctcgttcggcgttttacggcgctgggcgccttccaccatggcgatcatccggtcgaggaaggtttctcccgggttcacgctgcagcggatcaccagccagtcggagagaatgcgtgtcccgccggtcaccgaggcaaaatcgccaccggattcacggatcaccggggcagactcgccggtaatggcgctttcgtccaccgaggcgccgccttcgatgacttcgccatcgcaggggataatatccccggcttccaccagcaccacgtcgcctttgcgcaggtcttccgccggcacgtggtcgaccggcgcgtcatgctgcggggcgcgcagtttgcgggcgaaggccgtttttttcacccctttcaggctgttggcctgggctttgctgcggccttccgccatcgcttcggcaaagttggcgaacagcacggtaaaccacagccagatactgacggcggcggtaaaggtggcgctaccggtcagggcgccgccagccatggcgatcgccagcagggtagttaacagactgcccacccagacgataaacatcaccggattgcgccattgcaccatcgggctgagttttttcacggcatccagcagcgcctggcgcaccagcgtcggctccagcagggctaattgtttgcgactcataacagggtgctccgcatcgctcaaagtaaggaaaagtgttcagccagcgggccaagcgccagcgcaggaataaaggtcagggcgcccaccagcagcacggtgccgatcagtaaaccgataaacagggcgtcgtgggtggccagggtgccggggctggccggttgaattttcttcgccaccagcgagccggcgatggccatcaccggaatgatgacggcgaagcggccgaccagcatgcagaacgccagcagcaggttccagaacggcgtcgccgcgcccaggccagcgaaggcgctgccgttgttattggccgccgaggtgacggcgtatagcacttcgctaaagccgtgcggtccagggttgaacatcccggcgcggccggcgtcggtcatcatcgccagcgccgtgccgagcagcaccagcgtcggggtgaccagaatggcgagggcgatcattttcatttcccggacatcgattttcttcccgaggtactccggggtgcggccgaccatcagcccggcgataaataccgccagcataacgaacagcagcatgccgtacaggcccgagccgacgccgccgaacaccacttcgccaatctgcatcagccacatcggcaccatgccgcccagcgcggtgaaggagtcatgcatggcattgaccgcgccgcaggaggcggcggtggtgatcaccgcgaacagactgctggcgagaataccgaagcgactctctttaccttccatattcaggctactgtcagcgcccagcgtcagcagatgcggattgccgcgggtctccgcccacatcaccacggcgacgcagaggataaagatcagcgtcattgcccacaggatggcgcgtccctgacgccgatcgcttaccacctcgccgaaggcgaagcacagcgccgtcgggatcaggaagatcgccagcatctgcacgagattggtcagcgcggtcgggttttcaaacggatgggcggagttggcattgaagaaaccgccgccgttagtgcccagcagtttaatcgcttcctgtgaggcgacaggccccatcggcagcagctggtgcaccccttcgagggtgataaagggctggtaggcctgcagattctgcggcacgccctgctgaataaagaacagggccaccagcagagagagcggcagcagcagccacagggtaatgcgcgtcaggtcgacccaggcattgccgagggtcgacattttctgccgggcgaaggcgcgggtcagggcgaagaccacggcgatgccggtggcggcggagaggaaattctgcaccgtcaggccgaccatctggctgagataactcatggtgctttcgccagcgtaagcctgccagttggtattgctgataaagctgatcgcggtattgagcgccagatcccatgacagccccggcaggtgctgcgggttaaacggcagcacgccctggagcatcagcagggcaaacagcgccaggccgccgagggcgttaaacagcaggatcgccagcaaatactgcagccagcccatctcttcggcgcggatcccggccacgcgccacaggacgcgctcgaccccggccaggccgggaagcgggatatcgttcaccattctcgccagacacatccccagcgggcgcgccagcaccagcaataccagcagatagctggctaataataaaaatccctgggcagccatcagaatgcctccgcatgtatcaaggcataaaccagataagccagtaacaggaacaccagcccaacgccagtgagtacgcctgcagtcacaatccacctccgggtgtgttttcgatttacctggaggatagaaattacggcgcaaagatttcgcaaaaatccgcgggtgcggtgtaaaaaaagtataaaaatgacaaaggcacaaattaactgattgttagtattaatttaactttttcgtaactaatttacgtggcgaatgtaaattaagtataaatacgtgctttttagtggtcggatgagtagtaaaattacaagcagagcggtattattttgctcagacaaacatgattaattttaccggcgctgcttgccggcctgacaaaggggagagaaatgatggcgttgtacaaagcttatcctgctcatattattttgctgcgtcgtgctttcgccgtcgtggctggcgtcgcggcgctgccggtgatgctgttctggaaagatcgcgcccgctattacagctggctgcaccgggtgtggtcgaaaaccagcgagcagccggtgtggatggcgcaggcggagaaagccgctcacgatttctattaatcctcctgctgcgaagaaaataacaagaccgccgggttgccccggcggttttttttcgccgcttgtctacactcgtttttatgcgccgccttggaattggcaggtgcgtattttgccggagcgcgctatttttgccggcttagatcataagatgagtattgctgacggataataaggagtgatatggccacccatctggtctggttacgcacggatttacgcattcacgataacctggcgctggctgccgcctgccgcgatccgcaggcgcaggtgctggcgctgtatatcgccaccccggggcagtggcgtgaacatcacctggcgccacggcaggccgcttttatcgccagccatttacagagtctgcatgccgcgctggcggaacggggcataccgctgtgggtagaagaggcggacgattttaccgccagcgtcgaacggctggccgatttttgccagcagcatcaggtcagtcacctgttctacaactatcagtacgaattcaatgaacgccagcgcgatgccgccgttgagaacaccttgtgcgacgtgatttgccagggctttgacgacagcgtcctgttgccccccggcagcgtactgaccggtggcggcgaaatgtataaagtcttcaccccgtttaaaaatgcgtttattcgccgtctgcgggacgggctgccggcgtgcgtggcggccccgaagccgcgccaggcgcctgcccgccaggcgccgccgctgcctgagcttaactacccgcaaacgccgtttgacgggctgctgtttgccgcggatgaaaaaacggcgctggcgcgtctgcgcgcgttttgtcagcaagcggcggcggattacgaggggcagcgcgacttcccggccgtggaagggaccagtcgcctgtcgccctgcctggccatcggcgtgctgtccccccgccagtgcctgcatcgtctgctgacggaacatcccgccgcgctggacggcggagccggcgccacctggcttaacgagctgatctggcgcgagttttaccgccatctgatggtctactatccgaagctctgtaaagggcggccatttactgcctggacagataaggtcgcctggcgcgcagaggaggcctccctacaggcctggcagcgcggggagaccggttttccgattgttgatgccgccatgcgccagcttaacgccaccggctggatgcataaccggttgcgcatgattgtagccagcttcctgaccaaagatttgcgcctcgactggcgggcgggcgagcgctatttcatgagccagctgattgatggcgacctggcggcgaataacggcggctggcagtgggcggcttcaacgggcaccgacgccgcgccctatttccgcatatttaatcccaccacccagggcgaaaagtttgataaacagggggtgtttatacgtcgctggctgccggagctggcaaaggtgccggagaaggccctgcatcagccgtgggcgtgggcggataaacaagggatcacgctggattattcgcgcccgatagttgatcacaagcaggcgcggcaggagacgctggcggcctgggaggccgccagaaaaggaattactccaccgccagacggcgggtcctgactttcagcgaatgatacagccagatgaccagcaccacgccgacgcaggccagcgcgccccaggtgatctggctgaagacggtaatgtaggcgtcaatggagtagttcaccgctccggcggcgtcgaatgacgcctgcgaggtctggtcggcgataacgccggccagatagttggcgatggcccctgagagcagcatataaataccggtcagcaccccagtgacacccgggatctcaatgcgggtgatctgcgacatcgcgaccgggtcgataaacagttcggcaaagcccatcaccgccagacccagcaccatcagcggcatggacgactgaccataggccgccgaccagcgggcgctgagggtcaaaatgcagaacccggcgctcatcaggcccagaccgagggcaaatttcccccagatgcgcacggtgcgattgccgttcacgctctctttcaccagccacgccagcaccatcccgcagagcatcaccgcgaaggcgttgattgactggaacatagcggtagggacttcgtagctcatgatatggcggttaacgaagcggtcaatatacaggctgatggagctcccgccctgttgggcgaaggcccagaacagcaggctgaaggcggtcaggacgacgatcaggcgcagatccttgcgctgtttatcggtttcggcgcgcaggtagatccgcgccagtaccgcgaggccaatggccgtggccacgatcagggcatacaccgaccactcctgccagaacagtaccgcaatcagcagcggggcggtaaccagcaataccagcagccagccccagttcggcaacaggaagcggcgtgcgcacagcgcctggcggttgacgccggcggtatgctggaaatgacggttgccgcagaggaaaatcaccagccccgcgaccatgccgatggccgccagggcaaagcccatcgcccagctatactcctcctgtacgtagccgcaggcgatcggcgcgataatcgagccgatattgccggcggcatacatcagcgaaaagccgccatcgcgacgcggatcggcgggttcgtacagctcccccagcagacagctgacgttggatttaaacaacccgtagccgcagacgatgatcgccagcgacaggtacaggaaaagcggagcggtttcgctggccccgagcaccagatggccaatggccatcagcagcgcgccgagcatgaccgccatccggttgcctaacagcttatcggccagatagccgccgaggatcggcgtcacatagaccagcgaacagtaggcgctgaacagggcgtaggcatggttatcgtcatatttgagctgattggtgagatagaggatcagcagggcgcgcatgccgtaaaagctaaagtactcccagatttgcagcgccacgacgtagtagatcgcccgcggctgcgatgatgttgtctgcatatgaagtgtgtttcctggcgtaaagcgaaagtcgatcgttctgcatgaatagcaatttatcagtcatattcatggcttgaggggctttctgattatttaatatgctttattagtgcataaatatacactaatgcgcggcgggatgaatagacaaattgcgggattcgttaaaaagtcatggtcagtgacggtcgcggactatcgacgacccgaatggatatggttatgttatgcctttgtataacctgattatctgctggagtggcgatgaaaaatagcgaactggaacaactgattaacgacaagctcaatagtgcggccatcagtgacttcgcccctaacggtctgcaggtggaaggacgcgaaacggtgcacaagatcgtcaccggagtgacggcctgccaggcgctgctggatgaggccgtccgtctgcaggcggatgcggtgattgttcatcacggctatttctggaaaaacgaatcgccagtgatccgcggcatgaagcgccgtcgcctgaaaaccctgctggccaacgatatcaatctctacggttggcacctgccgctggatgcccatccggagctgggcaataacgcgcagctggcgcatctgctggggattaacgtgctcggcgaaatcgaaccgctggtgccgtggggcgagctgtcgatgccggtttccggcctcgaactggcctcgtggatcgaagcgcgactggggcgtaagccgctgtggtgcggcgataccgggccggacaccgtcagccgcgtcgcctggtgtaccggcggcggccagagctttatcgacgccgcggcgcgctttggcgtggacgcctttatcaccggcgaagtgtcggaacaaactattcactctgcccgcgagcagggcctgcatttttatgccgccggccaccacgccaccgagcggggcggcattcgcgccctcagcgaatggctgacggaaacgaccgatctggatgttacctttattgatattcctaaccctgcctgacgggagagaagaaagtgcagcgagcgcgttgttatctgttaggtgaaacggcggtggtcctggagcttgagcctccggtgaccctggagagccaaaaacgtatctggggcctgacgcagcggttgaccgatcgcgaagaggtggttgaagtgatcccggggatgaacaacatcaccgttgtgctgcgtcgtccgcaggagatggcgtgggaggcgattgacaagctgcagcgctggtgggaagagagcgatgcgctggagccggaatcccgtgagataagtatcccggttatctacggcggcgaggcggggccagatcttggcgacgtcgcgcgccatagcggtttgagcgaaaagcaggtggtcgaactgcactcttcggtggagtatatggtgtggtttctgggtttccagccggggtttccgtattttggcggcctgccggagcagctggcgatgccgcgtcgcgccgagccgcgcgtactggtaccggcgggatccgtcggtatcggcggatcgcaaaccggtatttatccgctggcgacgccgggcggctggcagctgctggggcgcacgccgctggcattattcgatccaaaacgtgaagagccggtgctgctgcgttccggcgatcgcgtgcgctttgtgccgcagaaggagggggtatgttgaaatttatccgcgccggcatgtatacctcggtacaggatggcggccgggaaggccagcgccagtgggggattagccgctgcggcgcgctggataaaccggcgatgaccattgccaatctgctggtgggcaatgcgccggaggcggcggcgctggaaattacgctgggtcaggtcgatgtgcagtttacccgccactgctggttcgcgttgaccggcgccgcctgtgaagcgacgctcgacggcgcgccggtctggttgggctggcgaatggaggcgaaggccgggcagcggctggtgctgaaaaatcctcagcatgggatccgcagctatctggcggtcgcgggcggtattgatgtccctgaagttttaggttcccgctctaccgatctgaaagtcggtatcggcggaatcgaagggcgccggttgcaggatggcgatcaagtgaagattgggaaatcgtcccgccgctttagcgcctcgcgcggcgttaaacagctgccgataggcaatattattcgcgcgctgccggggccggagtatcacgaattcgacagcgtgtcgcaggagtctttctggcgctcgccgtggaagctgagtccgcaaagcaaccgtatgggctaccgcctgcaggggcagccgctcaggcgcacaaccgaccgggaaatgctctctcatggcctgctgcccggcgtggtacaggtaccgcataacggccagccgattgtgttgatgaacgatgcgcaaaccaccggcggctatccgcgtatagcctgcattattgaagccgatatttaccaactggcgcaaattccgctaggtcagccgatccatttcgtcccctgttcgctggaggaagcgctaaaagcgcgcgccgaccagcagcgctaccttgaacaactggcctggaggttaagcgatgaaaattgatttaaatgccgacctcggcgaaggctgcgccagcgatagcgcgctgctgcagctggtctcttccgccaatatcgcctgcggctttcacgccggcgatgcggttctcatgcagcaatgcgtgcgcgaggcgctgaaaaacggcgtcgctattggcgcacacccgagcttcccggaccgggaaaatttcggtcgaaccgcgatgcagttaccgcctgagacggtctacgcccaggtgctgtaccaaattggcgcgctggcggcaatcgtacacgcccaggggggcgagctgcggcacgtcaaaccgcatggcatgttgtacaaccaggcggcgaaagagccgcctttggccgacgctatcgcccgtgcggtgcgcgatgccgacgccgacctggtgctggttgggctggcgggcagcgagcttatccgcgccggacagcattatcagttgacgacgcgccaggaagtcttcgccgatcgcggctatcaggccgacggcagcctggtgccgcgcagccaaccgggcgcgctgattgagagcgaagagcaggcgctggcgcaaacgctggaaatggtgcagcacaatcgggtgcgcagcctgagcggcgaatgggcgcatgttaaggcggaaacggtctgcctgcatggcgatggcgctcacgcgctcgatttcgcccggcgcttgcgcgccgcgtttgccgggcggaatatcgacgtcagcgcggacctcgagtaatagtccgcctaagttattaataataattaaatcaaataattaacaacactcacaatactcacaactgaacaggacgttattatgcaagaggcgatatccctctggccgctaatcggcattgccgtgattgtggtcggttttgtattacgctttaacccggtgctggtggtgattatctccgggatcgtcaccggcgtggcggcgcatatgccaatagccactattctggagaaactgggcgagggcttcctgaatacccgtaatctgccgtttattctgctgctgccgctggcggtgatcgggctgctggagcgccatggtctgaaagagcgggcgcaggcgtggatcgcgaagatccatagcgcgaccgccggacgtctgctgatcgtctatctgtttgtgcgcgaagccaccgccgctctggggttgaccagcctcggcggacatccgcaaatggtgcgcccgctgctggcgccgatggcggagggggcggcggaaaagcgctttggcccgctgccgggcaatgtacgctaccgcctgcgcgcgatgtcggcggcgaccgataacgtcgggctgttcttcggcgaagatatttttgtcgccttcggcgcgatcatcttcatgcacaactttatgctggagtcgggtgggatccagacagaaccgttgcatattgccctgtgggggatcccgacggcgatctgcgcctttctgatccacgccgcgcgcctgtggcgactcgatcgccatctccagcgcgagctggaccggataaacgccggacaggcgaaaggcggtgtggcatgaatttccagcaaacctatttatactggctggccggcgcggtactgctggtcgtggctatcatgtcctggcgcgacaaaagcaatccgcggcgtctgacaaccggtctgttctggggcctgtacgggctggtgttcttgctcggcgactggacatatcaactggtgggcgataagcgtacggtgaatatcgctgtcggcggggtggtggtcatcctggcgctgatcgccggttttggcggcgtgcgcctcggcagctaccatcagcgtacccaggaagagaaaaccaccagcgcgaaacgcctcggcaacaaacttttctttccggcgctggcgattccggtcgtcaccgtcattggcgtactgctgtttaacaatctgccctcatggcaggcggcgctcttcgggccgggcaaccacgcgacgctgattactctgttctcgatgactgtcggtacgctgattggcctggcgatggcgattcgtatgacgcatgaaacggtggcgcagccaatgcaggaagcgcgccgtttgcttgattccgtcggctgggcctttatcctgccgcaaatcctcgcggtgctggggctgctgtttaccgcagcgggcgtcggaaccagcatttcatggctgaccgagcactatctggcggtcgataaccgctttatcgccgtggctgtgtatgccatcggcatggcggtgctgacaatggtgatgggcaacgcctttgccgctttcccgattgtgaccgccggagttggcattccgattttagtcctgcagcacggcggcaatccggcggtaatggcggcgattggtatgttttccggctactgcggcacgctgatgacgccgatggcggcgaacttcaatattgtcccggcggcgctgctggaactgccggataaaaacgcggtaattaaagcccagataccgaccggtatcctgctgcttatcgtcaatgtattcttactctatttcctgatgttcctgtaaggagggatgatggctggcgtattgattaccggttttgagccgttcggcggcgaaacggttaatccttcatgggaagtggttaagcagttggatgacatgattattcgcggacagcaggtggtggctaaacaattaccctgcgtattcggcgaagcgctgacggtgctgaaggcggcgctggaaacctatcaaccgcggctgacgattgccgtcggacaggccggcggccgtgtagatattaccgtcgaacgtgtagcgatcaatgtcgatgatgcgcggatccccgacaataaaggccagcaaccgatcgatgagccgatcgtcgctaatggccctgcggcctgcttcagtacgctgccgatcaaagcgatcgtcagcgcgctgcgccagcaggggatcccggcctcggtgtcgcaaaccgcgggcaccttcgtctgcaatcacgtgatgtatggtttgctgcatcagctgcagggaaaacgcggacagaagggcggttttatccatattccgtatctgcctgaacaggcggcggcccacccggggcaggcgagtatgtcggtcgcgacggtacgcgcggcgctggaaacggcgattgccgtcgctcttgaacaggatgacgatgtcaaaattggcggcggcgccacccattaacagaaggatgacagtatgccggaaggtccggagatccgccgtgcggcggataaactggaggcggcaatcaaaggcgaacccttaaccaacgtttggttcgcctttcctcagttgcaaccctatcaaactcagctaactggtcagcgggtgacccatatcgccacccgcggcaaggccctgctaacccacttctccggcggattgaccctgtatagccataaccagctgtacggcgtctggcgcgtggtggatgccggcgttgagccgcaatcgaaccgcgtactgcgcgtcaggctgcagaccgccagcaaggcgattttgctctacagcgcgtcggacattgatatcctcacggcggagcaggttgccaaccatccgttcttgctgcgcgtcggaccggacgtgctggacatgacgttaaccgcggagcaggtgaaagcgcggctgctgtcggccaaattccgcaatcgtcagttttccggcctgctgctggatcaggcttttcttgccgggctcggaaactatctgcgggtggaaattctctggcaggtgggattaagcggtaagcgtaaagccgctgaactgagcgacagtcagctggatgcgctggcgcacgcgctgctcgatatcccgcggctgtcctatcgtactcgcggtctggtggatgacaacaagcatcacggcgcgctgtttcgctttaaggtcttccatcgcgatggggaaaggtgcgaacgctgtgggggaatcattgagaagacgacgctctcctcgcggccattttactggtgtccaggatgccagcattaagccggctggcgggcgatttcagcatgaagcgcgttatcaggcataaaaaaacgcgccagcaggcgcgtttttatgatccggacagtgcgattaacgcttaatgtcggactggaaatcgcgtttggcgtagccggtatacagctgacgcggacgggcgatcttcatgccatcgctgtgcatttcgttccagtgcgcaatccagcccacggtacgcgccatggcgaagataacggtaaacatggaggacggaatacccatcgctttcaggatgataccggagtagaagtcgacgttcggatacagtttcttctcgatgaagtacgggtcgttcagcgcgatatgctccagctccatggccacctgcagcaggtcgtctttggtgcccagctctttcagcacttcatggcaggtttcacgcatcacggtggcgcgcgggtcgtagtttttgtaaacacgatggccgaagcccatcaggcggaaagagtcattcttgtctttcgcacgacgaacaaattccggaatgtgctcaacggagctgatctcttccagcatcttcagcgccgcttcgttggcgccgccgtgcgccggtccccacagggaggcgatgccagcagcgatacaggcgaacgggttagcgccggaggagccggcggtacgtaccgtcgaggtcgacgcgttctgctcgtgatcggcgtgcaggatcagaatacgatccatcgcgcgttcaagcaccggattgacttcatactcttcgcacggtgtcgcgaacatcatgcgcaggaagttgccggcgtaggagaggtcgttgcgcggataaacaaacggctggccgatagaatacttgtaacacatggctgccatagttggcattttggacagcagacggtaggcagcaatctcgcggtgacgtgggttattcacgtcgagggagtcatgatagaacgccgccagggcgccggtgatcccgcacatcaccgccatcgggtgggaatcgcgacggaacgcgtggaacagacgcgtgatctgctcatgaatcatggtgtggcgggtgacggtagttttgaattcgtcatattcggcctgagtcggcttttcgccgtacagcaggatataacagacttcaagataattagattcggtcgctaactggtcgatcgggaagccgcggtgcagcaggatcccctcgtcaccatcgataaacgtaattttagattcacaagaagccgttgatgtgaaacctgggtcaaaggtaaatacgccttttgaaccaagactacgaatatcaataacatcctgaccgagcgtgccttttagcacatccagttcaatagcagtgtcaccacccagggtgatttttgctttagcatcagacatttatggtctccttagcgcctttattgcttaagactgccgggtggtggatttgctttcggcccgcgcctgcatacgttaccagtttgttatgttgcacacagctctgcgtcagcgaaaagggcagggtacagagcaacggcgcttgatggcacgtccttcagggctgcggtgaaacaacagcaaatcagcgttttagcagtccgaatattaaaacctatataccactaataactgtcctgattacatcggtcaatactgacacactgttacataacttattctcaggtgaaagagtgaccccataacttttgagcattattgcatttaactggtaatggttgtaacaagaatgtttaatatttgtcaaatcaggtgattaaaaattaaaaaaatgttggtatcgtgaccttgatcactgttccggagaaaacccaacaaactatatgtaggttaattgtaatgattttgtgaacggcctatactgcggccaggtctccggaacaccctgcaatcccgagccacccagcgttgtttagtgatgttttaatgcctgaaaagacgttttaacatgacttctggttatagaaaggacgctgtctgacccgcaagcagaccggaggaaggaaacaataagaacagcatgtgggcgttattcatggtaagaaatgtgaaaaaacaaagacctgtcaatctggatctacaaacgatacggttcccaatcacggcgatagcgtccattctccatcgcgtttccggtgtcatcaccttcgtggcggtcggaattctgctttggctgctgggcaccagcctttcctccccagaaggttttctgacggcggcctccatcatggatagcttctttgtgaagttcatcatgtggggcattctcaccgcgctggcctatcacgtcgttgtcggtattcgccatctgatgatggactttggctaccttgacgaaaccctcgaagcagggaaacgttccgccaaaatttcttttgttattactgtcgtgctttcacttctcgcaggagtcctcgtatggtaagcaacgcctcagcactgggacgcaacggcgtacatgactttatcctggtccgtgctaccgccatcgttctgaccctctacatcatctacatggttggcttcttcgccaccaccggtgaaatctcatgggaagtgtggaccggattctttgcctccggcttcactaaagtcttcactctgctggctctcgtttccattctcatccatgcctggatcgggatgtggcaggtgttaacggactacgttaaaccactggctctgcgcctggttctgcaactggctatcgttgtggcgctggtggcttacgttctttatggatttgttgtggtgtggggtgtgtaatgaaattgccagtcagagagtttgatgctgttgtcatcggtgccggcggcgcaggtatgcgcgcggcgctgcaaatttcccagagcggacagacctgtgcactgctctccaaagttttccctacccgttcccataccgtatccgcgcagggtggcatcaccgtcgcgctcggtaactcccatgaagataactgggaatggcatatgtacgacaccgtaaaagggtcggactatatcggcgaccaggacgccatcgaatacatgtgtaagaccggcccggaagcgattcttgagctggagcacatgggactgccgttctctcgtcttgacgatggccgtatttatcagcgcccgtttggcggccagtcgaagaacttcggcggcgaacaggcggcgcgtaccgcggcggcggctgaccgtaccggtcacgccctgctgcacactctgtatcagcagaacctgaaaaaccacaccactatcttctccgaatggtacgccctcgatctggtgaaaaaccaggacggcgcggtagtcggttgtaccgccctgtgcattgagaccggcgaagtggtctactttaaagcccgcgccaccgtgctggcgaccggcggcgcaggccgtatctatcagtccaccaccaacgcccacatcaatacgggtgacggcgtcgggatggccatccgcgccggcgtgccggtgcaggatatggaaatgtggcagttccacccgaccggtatcgccggggctggggttctggttaccgaaggttgccgcggcgaaggcggttacctgctgaacaaacacggcgaacgctttatggagcgttatgccccgaacgctaaagacctggcgggccgtgacgtggtggcgcgttccatcatgatcgaaatccgcgaaggccgcggctgcgacggtccgtggggcccgcacgcgaaactgaaactggatcacctcggtaaagaggttctggaatctcgtctgccgggtatccttgaactttcccgtacctttgcccacgtcgatccggtgaaagagccgatcccggttatcccaacctgtcactacatgatgggcggtatcccgaccaaagtcaccggccaggcgttgaccgtgaatgagaagggcgaagacgtggtgatcccgggcctgttcgcggtaggcgaaatcgcctgcgtatcggtccacggcgccaaccgtctgggcggcaactcgctgctcgacctggtggtcttcggccgcgcggcgggcctgcatctgcaggaatccattgccgagcagggcacgctgcgcgacgctagcgaatccgatatcgaaggctcgctggatcgcctcaaccgctggaacaacacccgctctggtgaagatccggtggcgattcgtaaagcgctgcaggaatgtatgcagcataacttctcggtgttccgcgaaggcgatgcgatgcacaaaggtctggagcaactgaaagtgatccgcgagcgcctgaaaaacgcccgtctcgacgatacctccagcgagttcaacacccagcgcgttgagtgcctggagctggataacctgatggaaaccgcctacgcgaccgccgtatccgctaacttccgtaccgagagccgtggcgcccacagccgcttcgacttcccggatcgtgatgatgaaaactggctgtgccattccctgtacctgccagagtcggaatccatgacgcgtcgtagcgtcaatatggaaccgaaactgcgtccggcattcccgccgaagattcgtacttactaatgcggagacaggaaaatgaaactcgagttttcaatttatcgctataacccggatgttgacgacgctccgcacatgcaggattacacccttgaagcggaagaaggtcgcgacatgatgctgctggatgcgctgatccagctgaaagaaaaagatccgtcgctgtcgttccgccgctcctgccgtgaaggggtctgcgggtccgatggtctaaacatgaacgggaaaaacggtttggcgtgcatcacgccaatctccgcgctgaatcagccgggcaagaagattgttatccgtccgctgccaggattaccggttatccgtgatttggtggtggacatggggcaattctatgcacaatatgagaagattaagccttacttgttgaataatgggcaaaatcctccggctcgcgagcatctgcagatgcctgagcagcgtgagaaactcgacgggctgtacgagtgtattctgtgcgcctgctgttcgacctcgtgcccgtcgttctggtggaacccggacaagttcatcggcccggctggcctgctggccgcgtatcgcttcctgatcgacagtcgcgataccgaaaccagcgagcgcctggacggcctgagcgatgctttcagcgtattccgctgtcacagcattatgaactgcgtcagtgtgtgtccgaaggggctgaacccgacgcgcgccatcggccatattaagtcgatgctgctgcagcgcagcgcgtaagcaacacggtctgtcccggatggcgctagcgcttatccgggctaccaaagcagtagccccggcaagcgttagcgccgccgggggatatagcaggaaatctttaaaaaccgccacaagatgtaccagtaatcgaggcgttcagtgcgaggtaaggcggcaactgagcgcatccccgggagcatagtgaactatgtgaccggggtaagcgaaggcagccaacgcaaccgcagcctgaacgctgaagattaatggcagtttttaaaggttccttagcggatagaaaccacaactcgtccgcaacaagtgaaccccggcacgtgcactcggtgtgcgtggtagtttctacggcgaaataagcatatgaatgcttaagggatcacgatgcagaacggcgcaatgaaagcctggctggactcttcttacctctctggttcgaaccagagctggatagaacagctctatgaagacttcttaaccgatcctgactctgttgacgccaactggcgttcaatgttccagcagttacctggcaccggagttaaaccggatcaatttcattccaaaacgcgtgattatttccgtcgactggcgaaggatgcctcacgttacacttcttcgatttccgacccagacaccaatgtgaagcaggttaaagtcctgcagctcatcaacgcataccgtttccgtggccaccagcatgcgaatctcgatccgctggggctgtggaagcaagagagagtggcggatctcgatccggcctaccacgatctgaccgaggccgatttccaggaaagctataacgtaggttcatttgccatcggtaaagacacgatgaagctgggcgagctgattgccgccctcaagcaaacctactgcggctccatcggcgcggaatacatgcatatcacctctaccgaagaaaaacgctggatccagcagcgcattgaatcggtagctggcaaagcgagctttaccccggaagagaaaaaacgcttcctcagcgaactgaccgccgcggaaggtctggagcgctacctcggcgccaaattcccgggggcgaagcgcttctcgctggagggtggcgacgccctgatcccgatgctcaaagagatgatccgccatgcaggcaaaagcggcacccgcgaagtggtgctgggcatggcgcaccgcggccgtctgaacgtgctggtcaacgtgctgggtaaaaaaccgcaggacctgttcgacgagttcgcgggcaaacataaagaacacctcggcaccggcgacgtgaagtaccacatgggcttctcttccgatatggaaaccgaaggcggtctggtgcacctggcgctggcgtttaacccgtcgcacctcgagatcgtcagcccggtggttatcggttccgtacgcgcccgtctggatcgtctggacgagccaagcagcaacaaagttctgcctattaccatccacggcgacgccgccgtcaccggccagggcgtggttcaggaaactctgaacatgtccaaagcccgcggttacgaagtgggcggtaccgtgcgcatcgttatcaacaaccaggtgggcttcacgacctctaacccgctggatgcgcgctcaacgccgtactgcaccgacatcggtaaaatggtgcaggcgccgattttccacgtcaatgcggacgatccggaagcggtcgccttcgtcacccgtctggcgcttgatttccgcaatacctttaaacgcgatgtcttcattgacctggtgtgctaccgccgtcacggccacaacgaagccgatgagccgagcgcaacccagccgctgatgtatcagaagatcaaaaagcatccgactccgcgcaaaatctatgctgacaagctggagcaggagaaggtggcgactctggaagatgcgaccgagcaggttaacctctaccgcgatgcgctggatgccggcgaatgcgtggtgcaggaatggcgtccgatgaatatgcattcctttacctggtcgccgtacctcaaccacgagtgggacgagagctatccggataaagttgagccgaaacgtctgcaggagttggccaaacgcatcagcacggtaccggaaggtatcgaaatgcagtcccgcgtggcgaaaatttatgccgaccgccaggcgatggcggcaggcgagaagctgtttgactggggcggtgccgaaaacctggcctacgccacgctggttgacgaaggtattccggttcgtctgtccggcgaagactccggccgcggcaccttcttccaccgtcatgcggtgatccataaccagaccaatggttcaacctacacgccgctgcagcatgtccataacggccagggccagttccgcgtttgggactcggtactgtctgaagaagcggtgctggcgttcgaatatggttacgccaccgccgagccgcgcactctgactatctgggaagcgcagtttggcgacttcgccaacggtgcgcaggtggtgatcgaccagttcatctcctccggtgagcagaagtggggaaggatgtgcggcctggtgatgctcctgccgcacggttacgaaggccagggcccggagcactcctccgcgcgtctggagcgttatctgcagctgtgcgctgaacaaaacatgcaggtctgcgtgccgtccacgccggcacaggtttatcacatgctgcgtcgccaggcgctgcgcggtatgcgtcgtccgctggtggtgatgtcgccgaagtcgctgctgcgtcatccgctggcggtttccagcatggatgagctggcgaacggcactttcctgccggctattggtgaaatcgatcaacttgatccgcaggctgtgaagcgcgttgtgctgtgctctggtaaggtttactacgacctgctggaacagcgccgcaaaaacgagcaaaaagatgtcgctatcgttcgtatcgagcagctctatccgttcccgcatcaggcggtgcaggaagcgctgaaagcgtatgcgcacgtgcatgattttgtctggtgccaggaagagccgctcaaccagggcgcatggtactgcagccagcatcacttccgtgaagtgattccgtttggggcctctctgcgttatgcaggccgcccggcctccgcctctccggcggtagggtatatgtccgttcaccagaaacagcaacaagatctggtcaatgacgcgctgaacgtcgattaattaaaggatacacaatgagtagcgtagatattctggttcccgacctgcctgagtccgtagctgacgcaaccgtcgccacctggcacaaaaaaccgggcgacgcggtcgtccgtgacgaagttctggtcgaaatcgaaactgacaaagtggtactggaagtaccggcatcagcggacggcattctggatgcagtgctggaagacgagggcgccaccgtcctgtctcgccagatccttggccgcctgcgcgaaggcaacagcgcaggtaaagaaagcagcgagaaagccgatgcgaaagcgtccactccggcgcagcgtcagcaggcctctctggaagagcagaacaacgacgcgctgagcccggcgatccgtcgtctgctggctgaacacaaccttgacccagcggccatcaaaggcactggcgtcggcggccgtctgacccgcgaagacgttgagaaacatctggcgaaagccccggcgccggcagaagccaaagcgccagccgccgccccggcagccgcgccggcgccgcagctgggccaccgttcggaaaaacgcgttccgatgacccgtctgcgtaaacgcgtagccgaacgtctgctggaagcgaaaaactctaccgccatgctgacgacctttaacgaagtcaacatgaagcccatcatggatctgcgtaagcagtacggtgaggcgttcgaaaaacgtcatggcatccgcctgggctttatgtccttctacgtcaaagcggtagtggaagcgctgaaacgctatccggaagtgaacgcttccatcgatggcgacgacgtggtgtaccacaactacttcgacgtcagcatggccgtatccactccgcgcggtctggtcaccccggtgctgcgtgacgtcgacctgctgggcatggcggatatcgaaaagaatatcaaagagctggcagtgaaaggccgcgacggcaagctgaccgtagacgacctgaccggcggtaacttcactattaccaacggcggcgtcttcggctccctgatgtccacgccgatcatcaacccaccgcagagcgctattctgggtatgcatgccattaaagaccgtccgatggcggtcaatggcaaggtagagatcctgccgatgatgtacctggcgctctcctatgaccaccgtctgatcgacggacgtgaatcggtaggcttcctggtggcgattaaagagctgctggaagatccgacccgtctgctgctggacgtgtagtcagcaagcgtattacctaccgtaggccggataacacgcgttagcgccgttatcaggcctacaggtttaaagataattacaccctgaaggatggactgaacacatgaacttacatgaatatcaggcaaaacaactttttgcccgctatggcttaccggcgccggtgggttatgcctgtactactccgcgtgaagcagaagaagccgcttcaaaaatcggcgcgggtccgtgggtagtgaaatgtcaggttcacgctggtggccgcggcaaagcgggcggtgtgaaagtagttaagagcaaagaagagatccgcgcatttgccgagcactggctgggcaaacgtctggtgacctatcaaacagatgcgaacggccagccggttaaccagatcctggttgaagcggcgaccgatattgacaaagagctgtacctgggcgcggttgttgaccgcagctcccgtcgcgtggtgttcatggcgtctaccgaaggcggcgtggaaatcgagaaagtggcggaagagaccccgcacctgatccacaagatcgccatcgatccgctggcgggcccgatgccttaccagggtcgtgaactggcgttcaaactgggtctggaaggtaaacaggttcagcagttcaccaagattttcatggggctggcgaccattttccttgagcgcgacctggcgctgatcgagatcaacccgctggtgatcaccaagcagggcgacctgatctgcctcgacggcaaactgggcgctgacggcaacgcgctgttccgccagccggatctgcgcgaaatgcgcgatcagtctcaggaagacccacgtgaagcgcaggcggcgcagtgggaactgaactacgtcgcgctggacggcaacatcggctgcatggttaacggcgcaggcctggcgatgggtaccatggacatcgttaagctgcacggcggcgaaccggctaacttcctcgacgtaggcggcggcgcgaccaaagagcgcgtgaccgaagcgttcaaaatcatcctctctgacgacaacgttaaagcggtgctggttaacatcttcggcggcatcgtgcgttgcgacctgatcgctgacggcatcatcggcgcggtagcggaagtaggggttaacgttccggttgtggttcgtctggaaggtaacaacgccgaactgggcgcgaaaaaactggctgacagcggcctgaatattattgcagcgaaaagtctgacggacgcagcacagcaggttgttgccgcagtggaggggaaataatgtcagttttaattaataaagataccaaggttatctgccagggcttcaccggtagccaggggaccttccactctgaacaagcgatcgcttacggtacgcaaatggttggcggcgtgacgccaggcaaaggcggcaccactcatctgggcctgccggtgttcaacaccgtgcgcgaagccgttgaagcgaccggcgcgaccgcgaccgtgatctacgttccggcgccgttctgcaaagattccatcctggaagcgatcgacgcgggcattaagcttatcatcaccatcaccgaaggtatcccaacgctggatatgctgaccgtgaaggtgaagctggacgaagcgggcgtgcgtatgatcggcccgaactgcccgggcgttatcactccgggcgagtgcaaaatcggcatcatgccgggtcacattcacaagccgggtaaagtgggcatcgtttcccgttccggcaccctgacctatgaagcggttaagcagaccaccgactacggcttcggccagtctacctgcgtcggtatcggcggcgacccgatcccgggctccaacttcatcgatatcctgaagatgttcgaggaagatccgcagaccgaagcgatcgtcatgatcggtgagatcggcggcagcgcggaagaagaagcggcggcttatattaaagatcatgtcactaagccggttgtcggctacatcgcgggcgttaccgcgccgaaaggcaagcgtatgggccacgcgggcgctatcatcgccggcggtaaaggtacagcggatgagaaattcgcagcgctggaagcggcgggtgtgaaaactgttcgcagcctggccgacatcggcgaagcgctgaaagctattatcaagtaaaccctctctgcttgtccgcaagcagaaatctgtccgatttcgacatggttggccaccgtcaggtggccttttttgtgatcgttataccgtctcgtcagaaccgcagcgccaacaacgaattgattttctgcgaaaagccctatctatcatattgatttaatttattatttaataagtattttcgatgcgctgtactggctaaaaaatatatcccggctgtaccgtagggaaacaaaagcggcagcgaaaaagcgtggggcaggggataaggaagaagataaaatactgtgagcggtctaacattattcggatcggttccttttttttgttttttttccacgacgttaaataatattacctatgattctcatatctctctttttagtaactggaaaagccatagtttaaacacttaattaacattaagttcaccaatattctttattgggctacataattaacacgtagagtaaaaattgatttatatcaatacttaatccttggaaaaatccctcaaaaaacgttaaattgtctcaagtcaaattggctgaattcagccatcttcactatatattgatcaccgtcgaaaaatgtaaaactggaacaataaaaacatatttattgtaaggttattgcggcgtaatatattggggaatcaattgggtttttcgttaacgtatttgtaaccttaccctggcatggttttaccttcgattgaaacctgctgtggacgggcgacaaataaatttgtattggggcatgcgtatgagccagagcttctcggttcattttcggagtcttcatgcgatgagcaaggagtcatgatgttagatatagtcgaactgtcgcgcttacagtttgccttgaccgcgatgtaccacttcctgtttgtgccgctaacgctcggtatggcgttcctgctggccatcatggaaacggtctacgtcctttccggcaaacagatttataaagatatgaccaaattctggggcaagttgtttggtatcaacttcgcgctgggtgtggcgaccggtctgaccatggagttccagttcgggactaactggtcgtattactcacactacgtgggcgatatctttggtgcgccgctggccattgaaggtctgatggccttcttcctcgaatccacctttgtaggtctgttcttcttcggttgggatcgtctgggcaaagttcagcacatggccgtcacctggctggttgcgctgggttccaacctctccgcgctgtggatccttgtcgccaacggctggatgcagaaccctatcgcatcggacttcaacttcgaaaccatgcgtatggagatggtcagcttctctgaactggtgctcaacccggtcgcccaggtgaaattcgttcacactgtggcgtcgggctatgtcaccggcgcgatgttcatcctggcgattagctcctggtacatgctgaaaggtcgcgacttcgcctttgccaagcgctcctttgccatcgcagccagcttcggtatggcggcgatcctctccgttattgtgctgggtgacgaatccggttacgaaatgggtgacgtgcagaaaaccaaactggcggctatcgaagcagagtgggaaacccagcctgcgccggcggccttcaccctgtttggtattcccgatcagaatgcgcagaccaaccactttgcgatccagatcccctacgcgctgggcatcattgctacccgctcggtggacaagccggttatcggcctcaaggatctgatggttcagcacgaagagcgtatccgtaacggcatgaaagcctacgcgctgctggaacagctgcgcgccggttcaaccgatcaggccgtgcgtgaccagttcaataacgtgaagaaggacctcggttatggcctgctgttgaagcgctataccccgaacgtcgctgacgccacggaagagcagatcgccaaagcgaccaaagactccattccaagcgtcgcaccgctgtacttcgccttccgtatcatggtggcgtgcggcatcctgatgctgctgattataggcgcctccttctggagcgtgatccgtaaccgcatcggcgagaaaaaatggctgctgcgcgccgcattctacggcctgccgctgccgtggattgccgtggagtcgggctggtttgttgccgaatacggccgtcagccgtgggcgattggtgaggtcctgccgacggcggtggctaactcatcattgaccgcgggcgacctgatcttctcaatgttgctgatctgtggtctgtacacgctgttcctggtggctgaactgttcctgatgttcaagtttgcccgcaaaggacctagcagcctgaaaaccggccgctatcactttgaacagtcctctgcggctattcagtcggcacgctaagacaggagtcgtcaaatgatcgattatgaagtattgcgttttatctggtggctgctgattggcattctgctgattggttttgccgtcgccgacgggttcgacatgggggtgggcatgctcacccgcttcctcggccgcaacgacaccgagcgtcggattatgatcaacgccatcgccccgcactgggacggtaaccaggtgtggctgatcaccgccggcggcgcgctgttcgctgcctggccgatggtttacgccgcggcgttctctggcttctatgtggcgatgattctggtgctggcctcgctgttcttccgtccggtcggttttgactaccgttccaagatcgaggacacccgctggcgcaacatgtgggactggggcatcttcatcggtagcttcgtgccgccgctggtgattggcgtggcctttggcaacctgctgcagggcgtgccgttccacgtcgatgaatacctgcgtctgttctataccggtaacttcttccagttgctgaacccgtttggtctgctggccggtatcgtcagcgtggcgatgatcctgactcagggcgccacctatctgcagatgcgtaccgtaggcgaactgcacctgcgtactcgcaccgtttccatggtggcggcgctggtgacgctggtctgcttcgcgctggcgggcgtgtgggtctactacggcatcgacggctatgtggtgaaatcggtgattgaccataccggcccgtctaacccgctgaccaaggaagtggtgcgtgaagctggcgcgtggatggtgaactttaacaatatgccagcgctgtgggcggtgcctgccctgggcgtggtgttgccgctgctgaccgtcgtttcgaccaaagcggataaaggtgcctgggcattcctgttctcctcgctgaccctggcctgcatcattctgactgccggtatcgcgatgttcccgttcatcatgccgtccagcactatgctgaacgccagcctgacaatgtgggacgcgacctccagtcagcggacgctgaacctgatgacctacgtggcgattgttttcgtgccgatcattctggcctacaccagctggtgttactggaagatgtttggccgcatcacgcgcgaagacatcgaaaagaatacccactcgctgtactaaggtaaggagctatatatgtggtacttcgcatggattttgggaacgcttcttgcctgtgcttttggggtcattaccgcgctggcgcttgagcacgtggaagccaccaaagccgggaagaaagaagaaatctgatgaaatttatcgctactctgtacgcgataatggacaagcgcccgctccgggcgctttccttattgatggcgctgctgctggctggctgcattttctgggatccgtcgcgctttgcggcgaagaccagcgagctggaaatctggcatggtttcttgctgatgtgggcggtttgcagcggcgttattcacggcgtgggctttcgcccgcgtgccgttcactggcaggggattttttgtccgcttatcgctgatatcgtgctcgctttaggtctcttctttttcttcttttgaataagagatctctgttaatgctatgggcttgcataagcccataaaaatttacgccccgtttactttcccccattccaaaccacctttcccgcgcgtatagtagcgaagtttgaaagctctaacctttttttgcattaccgggatgtaaagtgaatacaacgctgtttcgatggccggttcgggtctactacgaagataccgatgccggtggtgtggtttaccacgccagttacgtcgctttttatgaaagagcacgcacagagatgctgcgccaccatcactttagtcaacaggtgctgttggctgaacgcgttgccttcgtggttcgcaaaatgacgctggagtattttgcccccgccagactcgacgacatgctcgaagtccagacggaaattacctcgatgcgcggcacctctttggttttcacgcagcgaatcgtcaacgccgagaatacagtgttaaacgaagctgaggttctcattgtgtgcgttgatccactcttaatgaagccacgtgcgcttcccaagtctattgtcgcggagtttaagcagtgactgacatgaatatccttgatttgttcctgaaggcgagccttctggtaaaacttatcatgttgattttgattggtttttctatcgcttcctgggctatcattattcagagaacgcgtatccttaactcggccgcgcgtgaagctgaagcgttcgaggacaaattctggtccgggatcgagctctctcgtctgtaccaggagagccaggggcgtcgcgataacctgaccggttcggaacaaatcttctacagcggtttcaaagagtttgcacgcctgcatcgggctaacagccatgcgccggaagcgattgtcgaaggggcatcgcgcgcgatgcgtatttcgatgaaccgcgaactggaaacgctggaaacccatattccgttcctcggcaccgtaggctcgatcagcccgtatatcggtctgttcggtaccgtctgggggattatgcacgcctttatcgcccttggcgcggtgaagcaggccaccctgcagatggtggcgccaggtatcgccgaagcgctgatcgccaccgcgattggtctgttcgccgcgatcccggcggtcatggcgtataaccgcctgaaccagcgcgtgaacaagcttgaactgaattacgacaactttatggaagagttcaccgctattctgcaccgtcaggcctttaccaccagcgaaagcaataaggggtaagccatggccagagcacgtggacgcggacgtcgcgaactgaagtccgagatcaacatcgttccgctgctggatgtcctgctggtgctgctgctgatctttatggcaacggcgccgatcattacgcagagcgtggaagtcgatctgccggacgccacggaatcgcaagcggtgaaaagcaatgacgatccgccggtgattgtggaagtctccggggtagggcagtacagcgtgaaggtggggcaggagacgctgtcccagctgccgccggagcaggtaattgccgaagcgaagcgtcgtcttgaagccaatgaaaaaacggtattcctgatcggcggtgcgaaagacgtcccttacgatgaaattattaaagcgctgaacctgttgcatagtgcaggggttaaatcggtcggcttgatgaccaaacctatttaatcgcttcaggtaggtgcgtccgcgcggcgtccagtggcgggtatcgctcgccgtcggtgcgcatcgcggatacaggcgaacagtttttgggaaccgatagtgtcaaaggcaaccgaacaaaacgacaagcttaaacgagcgatcatcatttcagtcgcgctgcacatcattctgatcgcgctgctgatctggagttcgtttgacgagcatctggatgcctctgccggcggcggcggcggatcgtcgattgatgccgtcatggtcgatccgggggcggtggtaaataactataaccgtcagcaacagcagcaggccagcgcacgtcgcgccgctgaacagcgtgaaaaacaggcgcagcagcaggcggaagagttacgtgagaaacaggcggcggaacaggaacggctgaaacagctcgaacaggagcggctgcaggcgcaggaagcggcgaaagaagcgaaggagcagcagaagcaggctgaagaagcggctgccaaggccgccgcggcggcaaaagccaaagcggacgcacaggcaaaagaagcgcaggaagccgctgccaaagcggccgccgaggcgaaagcgaaggcggatgcccaggcgaaagcggcagaacaggcggcggccaaggcggctgctgacgcgaagaagcaggccgaagccgctgcagcgaaagccgctgccgaggcgaagaaacaggcggaagctgaagcggcgaaagctgcggccgaggcgcagaagaaagcggaagcggcggctgcgaagaaagcgcaacaggaagcggagaaaaaagcccagcaggaagcggctaagcaggcggcagctgaaaaagcggctgccgaaaaagccgctgcgcaaaaagcggccgctgagaaggccgccgccgagaaagccgcagccgctgaaaaagcggcggcagcgaaagcggctgcagcagagaaggctgcagctgataaagcggccaaggcggcagcagcaaaagccgcggcggcgaagaaagcggcggctgcgaaagaagcggacggcgttgacaacctgctcggcgatctgagttctggtaagaatgcgcctaaaacaggcggtggggccaaaggaaacaatgcctccgctgccgggagtggtaatactaaaaacagtgcctcaggggctgatatcaacaactatgccggacagataaaatcggcgattgaaagtaagttttatgacgcatcgtcctatgcgggcaaaacatgtaccttgcgtatcaaacttgctcctgacggcctgttgttaaatatacagtccgaaggtggtgatcctgctctgtgccaggccgctcttgccgcagcccgacaggctaagtttccgaaaccacctagccaggcagtatatgaagtcttcaaaaatgcgccactggacttcaaacctcagtgacatttttccccgtgcaaacggggaaaaacaatctatggtagtcacagggttttggtagttttgtatatttgagtttgttaacattctgctaaattatcgtgggctttccgcccggataagggagatatgatgaagcaggcattacgagtagcatttggttttttaatgctgtgggcggcggtgctgcacgcagaagtacgtatcgagatcacccagggggtggactcggcgcgccctatcggcgtggtaccgttccagtgggccggccagggcgctgcgccggaagatgtcggtggtatcgtggcagctgacctgcgcaacagcggtaaattcaatccgctggatcgctctcgtctgccgcagcagccgaccagtgcccaggaagtgcagcctgctgcctggtctgcgctgggtattgacgccgtagtcgtcggccaggtcacgcaaaatccggatggttcttatcaggttgcgtatcaactggtggacaccggcggagcgccgggcacaacgctggcgcaaggttcttttaaagtcactaagcagtacctgcgctatgcggcgcacgcggccagcgacgcggtatttgagaagctgaccggcatcaagggcgccttccgtacccgtatcgcctacgtggtgcagaaaaacggcggccagtacccttacgaactgcgcgtgtccgactacgatggttacaaccagttcctggttcaccgttcctcccagccgctgatgtccccggcctggtctccggacggttctaaactggcctacgttacctttgaaagcggtcgttctgcgctggtggttcagaccctggcgaacgcctctgtgcgtcagatcgcctccttcccgcagcacaacggcgccccggcgttctcaccggatggttctaaattggcgttcgcgctgtcgaaaaccggtagcctgaacctgtacgtaatggatctgggatcgggtcagattcgtcaggtgaccaacggtcgcagcaacaacaccgaaccaagctggttcccggacagccagaatctggccttcacttctgaccaggcaggtcgtccgcaggtatataaagtcaacattaatggcggcacgccgcagcgtatcacctgggaaggttctcagaaccaggacgccgacgtgagcgcggatggtaaaaccatggtaatggtcagctcggccggcggtcagcagcacattgccaaacaagatctggaaacgggtggtgtacaggttctgtcatcaacgtttttagacgaaacgccaagtctggcacctaacggcactatggtaatctacagctcttctcaggggatgggatccgtgctgaatctggtttctacagatgggcgtttcaaagcgcgtcttccggcaactgatggacaggtaaaatcgcctgcctggtcgccgtatctgtgataataaataattgattattaaaggaatcaaagaaatgcaactgaacaaagtgctgaaagggctgatgatcgctctgccggttatggcaatcgcggcatgttcttctaacaagaacgccagcaacgaccagagcggtgaaggcatgctgggtgccggcactggtatggacgctaacggtaacggcggcaacatgtcttctgaagagcaagctcgtctgcagatgcagcagctgcagcagaacaacatcgtttacttcgatctcgacaagtacgatatccgttctgacttcgctgctatgctggacgcgcacgctaacttcctgcgcagcaacccgtcctacaaagtgactgtagaaggtcacgcggatgagcgcggtacgccggaatacaacatcgctctgggtgagcgtcgtgctaacgccgttaagatgtatctgcagggcaaaggtgtttctgccgatcagatctccatcgtttcttacggtaaagaaaaaccagcagtactgggtcatgacgaagcggcatatgccaaaaaccgtcgcgccgtactggtttactaagagaattgcatgagcagtaacttcagacatcatttattgagtctgtcgttactggttggcatagcggccccctgggccgcttttgctcaggcgccaatcagtagtgtcggctcaggctcggtcgaagaccgcgtcactcaactcgagcgtatttccaatgctcacagccagcttttaacccaactccagcaacaactctctgataaccagactgacattgattctctccgcgggcagatccaggagaaccagtaccagctgaatcagatcgttgagcgccagaaacagattctgctgcagatagatagtttgagcagcggtggcggcgcagcatcaggtgcgcaggctccgtcgtcttctggcgatcagagcgcggctgccaccagcgcagcgccagcggccacctcaggcgccccggcgatgaccggcgatgcgaacaccgattataatgccgctattgccctggtgaaggatgcctcacgccaggatgacgcgatggtggcgtttcaaaacttcgtcaaaaagtacccggattcaacctaccagccaaacgctaactactggctcgggcagttgaactacaataaggggagaaaagacgacgcggcgttttacttcgcttcggtggtgaagaactacccgaaatcgccaaaagcgcctgacgcgatgtttaaagtcggcgtgatcatgcaggacaaaggtgataccgcgaaagcgaaagcggtttaccagcaggtgatcaataaattccccggcaccgacggtgcgaaacaagcgcaaaaacgacttaatgctcttggttgattacggcatgaccagaaatcgcgttatttctggtcttgtcgcctgaatcgccagcagttaagtgatctttatcgaaattttagttgcgctgaattctgaaatcagtaatatatgccgccgttgccaagggatatcaaacaagcccaaagcaatgccagagtgggtcgttagctcagttggtagagcagttgacttttaatcaattggtcgcaggttcgaatcctgcacgacccaccaatcgttctggtggaacgcgatagtaaaacgtgaaggataacgttgcgtcagcaacggcccgtagggcgaggcgaagccgagtcatcctgcacgacccaccgcttagtagtatccagcgtagtatcgggtgattagctcagctgggagagcacctcccttacaaggagggggtcggcggttcgatcccgtcatcacccaccaccgggtcgttagctcagttggtagagcagttgacttttaatcaattggtcgcaggttcgaatcctgcacgacccaccatctttaacatcgaacgtcggtgttaaacgtgaaggataacgttgcttcagctacggcccgaagggcaagcgaagcgagtcatcctgcactccaatcatttttatgatggggtaggtggacgcagtatcggtagtatccagcgcagtttcgggtgattagctcagctgggagagcacctcccttacaaggagggggtcggcggttcgatcccgtcatcacccaccactcgggtcgttagctcagttggtagagcagttgacttttaatcaattggtcgcaggttcgaatcctgcacgacccaccaatttcagcatttaactcagatgctgaacgtgaaggataacgttgcgtcagcaacggcccgaagggcgaggcaaagccgagtcatcctgcacgacctaccaatttctgaattggtgtcgagtgaaattattcaggtagtaccagagcgggtcgttagctcagttggtagagcagttgacttttaatcaattggtcgcaggttcgaatcctgcacgacccaccaatttcagcatttaactcagatgctgaacgtgaaggataacgttgcgacagcaacggcccgaagggcgaggcgaagtcgagtcatcctgcacgacccaccatcctgaatgatggcagcagtaaaatcccgcaaggggtcgttagctcagttggtagagcagttgacttttaatcaattggtcgcaggttcgaatcctgcacgacccaccaatgtaaaaaggcgccctaaaggcgcctttttgctatgcgcagaactcaacgattcgacaaaattgtcgggaacaattttgaacaacgcggcagcgttggcccgcagggcgagtctcaggatgagacgagtttctctgcagcaggttcgggtcgaacgtagtgagacaacggagccgcttgcggcgacggcccgcagggcgaggcgaagccgagtcatcctgcacgacccaccaatgtaaaaaggcgccctaaaggcgcctttttgctatctgcattttccctgccactcatcaatgttaatactttcttaattcatcattttcccacggtcacgctgcgcttaccgtgcctgcacaggatacgaaccggtcgttcgggcagatgcgcagcaccgtccccgggaaaagggtctgatgtacaaaattcatcacgacttttagctcgtaatcggctatcttgtttagcatataaaacaccatgaccgtattaagccgccgacaggccatactgacggttatagagttaagccagtaaaacgagattgcatgatgagcgtaatgtttgatcctgaaacggcgatttatcctttccctgctaaaccgcagccgctgaccgtcgacgaaaagcagttttaccgcgaaaaaatcaagcgcctgctacgcgagcgcgatgccgtgatggtggcgcattactacaccgatcctgaaattcaacagctggcggaagagaccggcggctgtatcgccgactcgctggagatggcgcgctttggcgcccgccattcggcctccacgctgctggtcgccggggtgcgttttatgggggaaaccgccaaaattctcagcccggaaaagaccattttgatgccgaccctgaacgccgagtgttcattggatctgggctgtccgattgaggaattcaacgccttttgcgacgcccatcctgaccgcaccgtcgtggtctatgccaatacgtccgccgcggtgaaggcccgcgccgactgggtggtgacctccagcatcgccgtggaactcattgaccatctggatagtcttggtcaaaagatcctctgggcgccggaccgccaccttgggcgttacgttcagcgtcagaccggcgcagacgtgctgtgctggcagggggcgtgcatcgtgcacgacgagtttaaaacccaggcgttgatgcggatgaaggctctgcatcccgaagccgccgtgctggtccatcccgagtcgccgcaggcgatcgttgagatggccgatgccgtaggctccaccagccagctgattgcggcggcgaaaagcctgccccagcgccagctgatcgtggccaccgatcgcggtattttctataaaatgcagcaggcggtgccggagaaaacgctgctggaagcgcccaccgccggcgaaggagcgacctgtcgcagctgcgcgcattgtccgtggatggcgatgaatggcctgaaagccattgccgagggtctcgagcagggcggcgctgcacatgaaatccatgtcgacgaagcgctgcgaaccggcgcattaattccccttaaccggatgctggattttgcggctacactacggggataacctattgtcgcgtcgccagacgctgaggggaggaaatggatttttttagcacgcagaatattttagtacatatacccatcggcgctggggggtacgatctctcctggatagaggccgtggggacgattgccgggctgttgtgtatctggctggcgagcctggagaagatcagtaactatgctttcgggctggtcaacgtcacgctgttcgccatcatcttctttcagatccagctgtacgccagcctgctgctgcagctgttcttttttgccgctaacgtttacggctggtatgcatggtcgcgacaaagcagcaaccatgaggctgagctgcagatccgctggctgccgcgcagcaaagcgctgggctggctggcggcctgcgtggtagcgatcggcttgctgaccctgtttatcaacccgttctttgctttcctgacgcggatcgcggtcagcctgatgcaagcgctcggtttgcaggtcactatgccggaactgcagccggatgctttcccgttctgggactcctgcatgacggtgctgtcggtggtggcgatgatcttaatgacccgcaagtatgttgaaaactggctgctgtgggtgatcgtcaacgtgataagcgtggtgatttttgcccgtcagggcgtctatgccatgtcgctggaatacctcttgctgacgttcattgcgttgaacggcagccggatgtggataaacagcgcgcgtgagcgaggttctcacgcgttttctggctaatggtggtggtgatgatcgtgcccggcgtgcatcgtgttgagatggcactccgggccgctgcagggctggtactccatctgcaccgtggcatgcgcaatttcatatttatgttccaggaaatgcaggatgcggttgagtaacgcgtcatggtcgtgcggtggaacgacctgtacatggagcgtcatcaccggtttttcccccaccagccagacgtggacgtggtgaacatcgcgtacctccgggatagagcgacggatatcccgctgcagggccgccacatccagcgaacgcggcgcgccttccagcaattcattcagactctctttcagtaatcgccaggcactacgtaataccaggcaggaaaccagcacggaaagaatcgggtcgacaggcgtccagccggtggtgaggatcaccacggccgccacgatcgcgccgaccgagcccagcaggtcgccaagcacgtgtagcgctgcggcgcgtacgttaagattccgctcctcgctaccccgatgtaggatccaaaacgccagcacgttggccagcagaccggcgactgcaatgaccatcatcgtcacgccggctaccggctgcggatgctggaagcgctgaatcgcctcccagacaatcagcatggtgatcaccaccagagcaatagcattgagaaacgccgccagggtggttaaacgcaaccagccaaaggtatggcgggcatttggtgggcggctggcgaagcgaaccgccagcagcgcaaacagcagagcggcggagtcggtgagcatatggccggcatccgccagcagggccagcgagccggagatcgcgccgccgacggcttcaatcagcataaagccggcggtgacgataaacgcccatagcagccggcgggcgttgctgttatccggagcctggacagaggagtgcgaatgcgagtgcgccatagtgtcgtcccttaatagttatcattattacgctatgacatcataaacagagagcgataaaaaacgaagaaaaggcgagaccggctcgccttttcttcgatctgcccacctcatgtgttactgggtggtgccgtcggttttgctgttgtcttgggtcgtattgccgccgttgtccagttttttaccggtgtccggacagcggccgtctttacacatcgagtttttatgtacctcatcgctcgacatattatcctgggtcatcgtcgagcccgtggtgcccccagagccagagttgatctgactattgtccacgttgttcggcgccacgttctcacgggcatccggcgccacctgaccggcatccgcggaagagttggcctggccattattggactgggcaccggtgtctgccgccagggccgcgccgctggcaagacctaaggtggcggtgagcaaaagggtcgtcagttttttcatattcatcggatactcctgttaagccgggaaggggaaatgcgcttcccgcggtgagtgtgccagggatctgactcgctatggtttaagactccgcagacgatcgcagtgtcactatataatcctgaaacgtaagacttaattagctttaacagttaaatattgtagttcatgagcctggtttcgctactttatggcgtatttttgcctatttccaggattattccatcactactgtaaaatcacgtttacactatttcagcgaagagatagattggagggattgcatttcattgaataagtatggcaacgctggaaagaagatgaattatcagaacgacgatttacgcattaaagagatcaacgaattattacctcccgttgcgctcctggaaaaattccctgctaccgaaaatgctgcaaacaccgttgcacatgctcgcaaagcgatccatcagatcctcaaaggcgacgatgaccgtctgctggtggtgattgggccttgttctattcacgatccggcagcggcgaaagagtatgccgcccgcctgctgaccctgcgcgaggcgctgaagggcgagctcgagatcgtcatgcgggtctattttgaaaaaccgcgcaccaccgtcggctggaaagggctcatcaacgatccccatatggataacagcttccgcatcaacgacgggttgcgcatcgcgcgcaaactgctgctggatattaacgacagcggcctgccggcggcgggggaattcctcgatatgatcaccccgcagtatgtcgccgatctgatgagctggggcgccattggcgcgcgaaccaccgaatcccaggtgcaccgtgagctcgcctccggactctcctgcccggtgggctttaaaaacggtaccgatggcaccatcaaggtggctatcgatgcgattaacgccgccggcgcgccgcactgtttcctgtcggtcaccaagtggggccactccgccatcgtgaataccagcggtaacggcgactgccatattattttgcgcggcggcaaagagcctaactacagcgcgaagcacgtggcggaggtgaaaatcggtctggcgaaagcgggtcttccggcccaggtgatgatcgacttcagccatgccaactccagcaagcagttcaagaagcagatggaagtgggcgccgacgtatgccagcagatcgccggcggcgagcgcgccattatgggcgtgatgattgaaagccatctggtggaaggcaaccagagcctcgagagcggtgaaccgctgacctacggcaagagcgtcaccgacgcctgcatcggctgggaggataccgaaacgatcctgcgtcagctggcggaagcggtgaaaacccgccgcggctaagccttagcgttataaaaacctgtggtcatgtgtaccgtgctttcagctacagaatgttaaaagcacactacctgaccacaggttcaaacaacgtttattgaagatatcaattcgtgctgctcacctgacgcgatagggcgttaccgagcatattttctcacttcctgcttctgtagtgtatttccttcagtatcgattcccactattacgcgatagcgatcaaaatagattttttttatggattcggtgcccagttcaccataggcaagaatttcaactgatttgacatgtttcgtattgatggcagaagctccaccaatccccaatagggagacgccaccatattttttgcagaggtctgcaacataatcggcacggtcaccttttcctagaaaagcggttacgccttgctgaaacatcatttctacaaagggatccattcgagctgcagtggttgggccattcgaaccaatcggtaggccaggccttgccggacacggtcctgcatagtaaatgatctggtttttaagatcgaccggtggtttttcaccatgtttcaaagcgatttcaatttttttatgggccgcatctcgacaggtataaacaaagccagtgagatagataatatcaccaactttaagggttttggctatttcttttgttaaaggggtaatgactccaacttattgatagtgttttatgttcagataatgcccgatgactttgtcatgcagctccaccgattttgagaacgacagcgacttccgtcccagccgtgccaggtgctgcctcagattcaggttatgccgctcaattcgctgcgtatatcgcttgctgattacgtgcagctttcccttcaggcgggattcatacagcggccagccatccgtcatccatatcaccacgtcaaagggtgacagcaggctcataagacgccccagcgtcgccatagtgcgttcaccgaatacgtgcgcaacaaccgtcttccggagcctgtcatacgcgtaaaacagccagcgctggcgcgatttagccccgacgtatccccactgttcgtccatttccgcgcagacgatgacgtcactgcccggctgtatgcgcgaggttaccgactgcggcctgagttttttaaatggcggaaaatcgtgttgaggccaacgcccataatgcgggcggttgcccggcatccaacgccattcatggccatatcaatgattttctggtgcgtaccgggttgagaagcggtgtaagtgaactgcagttgccatgttttacggcagtgagagcagagatagcgctgatgtccggcggtgcttttgccgttacgcaccaccccgtcagtagctgaacaggagggacagctgatagaaacagaagccactggagcacctcaaaaacaccatcatacactaaatcagtaagttggcagcatcacctgttaaaggtaatgttaattccattagcaagcctcctgctattaaatagttttgctagcatgacgactagcattgcactggaaattaattgctacgggcagagcagtaatatggcatggataataatcaatatgtacgccaagagcggtaacacgtccccccatgcctaatgggccaatcccagtattattgacctcatctaatagttcagcttctaattttgcataaagcggttttgcattatattcgccaatagggcgtaataatgcttttttagccatccacgcacaatgatccattgtaccgcctattccaataccaataatatatggaggacacggatttccgcctacatggcgaacggtttcaagaacgaatctttttacgccttcaatatcatctccaggcaataatgttttaaatgtgcccatgttttcactgccgccgcctttaggcatgacggtaattgtcacgcgatcaccctcaacaatttcagtatgtaatactgccggagtattatcattagtattgatacgatcgaggggatctgcaaccattgattttcttaaataacccttttcatagccttgccgtacaccctgattgacctgctgctgaagagaaaatccttcccaacatacttcctggcctatttccatgatgacaatgcaggtgccagtatcatggcaacatgcgagttgctcttttttggcatactcaccgttatcaattaatattttaattgtctctttaccaagtttagactcttctttctcatatgctttacgaaaagcacacatcagattatcatcaagctcataacaggctttttttaccagttcttcaataactggaacgatgacctctgtattcagtattctactcatgcttcctccagaacttttgttttgcttatggttcacatttttatgttatgattattttttccatgaaggaaatatgttatgtttatcagacaataaattttatttatagttaagaggaatgcatggaaattagacagctggaatattttattagcgcatctgcattaggcaaccttaccaaggttgcagaacgtcattatgtttcgcaaccaaatataacagttgctataaaaaagctagagtctgagttaggtgttaatctgtttgagagaaggaaaaataagttggtgttaacggaagaaggggaattcttcttattaaaagtcaaacctctcattattgcattgaagaatagtgttgctgaaattaaagattatcataataaaaacagtggagtggtaacattagggattcctcctatgattagcctttttttgtttacaccactatttaaacattttcgcgaattatattcagaaatggaactttcattagttgaggaaggtacctttgggttgcatcaaaaactttctcatggcgatattgatttggcgattgtcattatcaatgatgcaccagaagagttagtaactgtaccattaatgactcagcagcatgttgtatgtatatccgataagcaccctttggcgaagaagaaaactatcgactgggaggatttgcaaaatgaaccattaattgttatgaaaaaagattcatggcatcgtaaagctattctaaatgaatgtgaaaagaggggtgttaatactcatatcttcttatcttccaatagtgtaaagaataatattgatttggtggcaaaaaatgagggtatatcatttattctcgatgcggtagggctaaaatgtgatggtgtaacaacaagagcgatgacagaacctgtctatgtcgagataggcctggcatggaaaaaggataagtatttatcatacgcatcaagagcattaattgcattcctggaacagtatattaaagacaatttccaatagtttatttatatttgttcctcaacaaataactcccataattcttcagcatctggtggcattttttttgccggtcgataaagccttatttcgattggtacccataaattgctttcttgatctgctgccgccacaatggttttagaggcaacatcatgtgccgcaagcgtttgtggcaaccaggctacaccatcacccgatctcaccattgccagcaaagtggccgccagatcggcaacaaatgcaattttcatgttatgtgtgattctgttaattgaagttgtatttgatattatcctacctaatccagattgtgatgaaaaagaaagatagggaaaattggacctattctcaatacaccataacggcttcatggtcatactatttggtttactaaaagggatgagtatatccattcctaagcggatgctcataaaatggctttcatttagattgaggtgcatatgagggtggtagtgacatagcagaaattgggcatcgccttgacgcatcattttttcgcatgagttcaacgaatcagagagcagacgacatgagccaaatttagctattttttcactttgttttaacatgcttggaacaaatgaaaaggataatgcatgggttgctgagaaaaccaaatgtggttgcttattgccagctgcatccagcgcattgttttttaatgaatataaatcgtgtattagttctggtaattgttcaataaaaacctcgccagctttggtcagcgatacacctcttttactcctttcaaagagtggtgtgccaacccattcttccagagactgtattctacggctaaatgcgggttgcgtcacatatcttgccgcagatgcttttgaaaaattcaatgtttctttcagtgctacgcagtcttcaagccatgttagttccaggtgatgccgatattgcataagccacaaccttatttgcattggatgagttttaattctacaagtagcattatacacacaacgttttcaagagggaattttggaaaaggataataaaaatatgttaatgccatgtgtttatttgtctgaatagtgttgttgataatagttttaaaagtttattgagcctgccatggcaacaaagctaatggattcattaatgctttgacaagttaacgatagaacttgcgttattggcctatggttgttatttcacccatttttataaggatgtgtatatgtcaccagctattatcactttgttgattttggttgttgcaataataatctttattagcgatcgcttgcctatgggattggtggcttttatggtcccgatggcattgtatttttttggggttattggtgtcaaagatatctttgcgtcaattgttaatgaaaatgttatccttatcattgccatgtgcgtgttgggcgcggcctttttcaaaacagggctagcatggcaatccagtaaaattttattgaagtatgcaaagacggagagaagccttagcgttttaatttttatgattagcggcgttatgtcggcatttgtttctaatagtggcactgttgctgtgcttattcccattgttttaggtatcgccgggactagtcaaatcaaacccattaaactactcatgcccttggtgtttggcgcgacaattggtgcagatatatcaattatcggttcgcctggaaacctgattgctaaaaatacaattgaaacttttagtaaagggaacttatcggtaccattttttgagtatgccaaaattggcatcccattgatgatagcgtgtgcattgttacttttcttctttggttccaggttaattccggatcgtgatgggcatgagcaatctgatgtacaaatggattatagccacattcctgagtggcacaagcttttaaccttgattgttttcgtattagcaattttgggaatggttgcaacagactatgttaaatttcttccacctattcatatcattgcttgctgcgccgctatcgttttggtattgaccggtgtattaaatcaaaaagaaacgtttaattcctttgagacattaactgtttttatgcttgcattcatgatgccacttggtgccgctttaaattcaactggagcaggtgagatgatagcaagagcggtaatttctgtaacagggaactctggcgtcatagtcatcatggcttcactatggatactgacctgggctctcactcaggtgatgagtaatactgctgcttgtacgttgttatgtcctgttggatggacaattgcacaatctatcggtgctgatccacgggctgtcgttattgccatttttattgccagtagcgtagcagtgtgtacacccatggccattccagccaattcgatgattatcggtcctggtaatgtgaagtttaaggattttttaaagccaggcttagcgataagtttcgtctgttttatcgttagcatgattttgttacctgttttttatccgttctattaagcgtaaagcgatttattaataatattcttcttactaattgaggcttaattttgcatagctccactctgttaggcgaaggcttcaccctgatgtttctcggcatgggctttgtgctggtgttcctgctgctgctcattttcgccatccggggaatgtccctcgccgtcaaccgcctgtttcccgagccgcctgccgcccccaaaccggcgccggccgccgtcgcgcccgccgacgatttcgcccgcctgaagccggcgattgtcgccgccattcaccaccatcgccgtcttcacccttaattcacggaggaattcatgaccgttgccattaccgatgtcgtcctgcgcgacgcccaccagtccctgttcgccacccgtctgcgtctcgacgatatgctgcccgttgccgctcagctggacgacgtcggctaccgctcgctggagtgctggggcggcgccacctttgacgcctgcatccgcttcctcggcgaggacccgtgggtccgcctgcgcgagctgaaaaaggcgatgcccaagaccccgctgcagatgctgctccgcggccagaacctgctcggctaccgccactacgccgacgacgtggtggagcgcttcgtcgagcgcgccgtcaaaaacggcatggacgtcttccgcgtcttcgatgccatgaacgacccgcgcaacatgcaggccgccctgcaggcggtccgccgccacggcgcccacgcccagggtacgctttcgtacaccaccagcccggcgcacaccctgcagacctggctcgacctcaccgaacagttgctggagaccggcgttgactccgtcgccatcaaggacatgtccggcattctgacgccgcatgccgcctttgagctggtcagcgaaatcaagaagcgctacgacgtcaccctgcacctgcactgccacgccaccaccgggatggcggagatggccctgctgaaggccattgaagccggggtcgacggcgtcgacaccgccatctcctcgatgagcgccacctatggccacccggccaccgaggcgctggtcgccaccctcgccggcacgcaatatgacaccgggctggatatccacaggctggagagcatcgccgcgtactttcgcgaggtgcgcaaaaaataccacgccttcgaaggccagctgaagggcaccgacagccgtatcctggtggcccaggtgccgggcgggatgctcaccaacctcgaaggccagctgaagcagcagagcgccgcccaccgtctggatgaagtgctggcggaaatcccccgcgtgcgcgaggacctcggcttcatcccgctggtgaccccgacctcgcagattgtcggcacccaggcggtgctcaacgtgctgggcggcgagcgctacaaaaccattgcgaaggagactgccggtatcctgaagggcgagtacggccgcaccccggccccggtgaacgccgccctgcaggcgcgggtgctcaacggcgccgacccggtgacctgccgcccggccgacctgctgaagccggagctggcgcagctggaagcggatgtgaaacgccaggcacaggagaagggcatcacgcttgccgaaaacgccatcgacgacgtgctcaccgtggcgctgttcccgcaaatcggcctgaagttcctcgaaaaccgccacaacccggcggcctttgagccggtaccgcaggcggaagccgcgcagccagtggcaaaagcagaaaaacctgccgcctccggcgtctacaccgtggaggtggaaggcaaagccttcgtggtcaaagtcagcgacggcggcgacgtcagccagctgacggcggctgctcctgctcctggctctgcacccgccgctccggccggcgccggcaccccggtgaccgccccgctggcgggcactatctggaaggtgctggccagcgaaggccagacggtggccgcaggcgaggtgctgctgattctggaagccatgaagatggaaaccgaaatccgtgccgcgcaggccgggaccgtgcgcggtatcgcggtgaaagccggcgacgcggtggcggtcggcgataccctgatgactctggcgtaaggatgaggagcggaaatggaaagtctgaacgccctgattcagggcatggggctgatgcacctcggcgccggccaggcggtgatgctgctggtcagcctgctgctgctgtggctggcgattgcgaagaagttcgagccgttactgctgctgccgattggcttcggcggcctgctctccaatatcccggaggccgggctggcgctcaccgccctggagagcctgctggctcaccacgacccggcgcagctggcggtgattgccgcgaagctccactgcgcgccgggcgtccacgccatcaaagaggcactggcgctggccctgccgtcggtacaggggcagatggagagcctcgcggtggacatgggctactccgccggggtgctggccatcttctataaggtggcgattggctcgggcatcgcgccgctggtcatctttatgggcgtcggagcgatgaccgatttcggcccgctgctggctaacccgcgcaccctgctgctgggggcggcggcgcagttcgggatcttcgccaccgtgctcggggcgctgacgctgaactacttcggcatcatcagcttcaccctgccgcaggcggcggccatcggcatcatcggcggcgccgacggcccgacggcgatttacctgtcgggcaagctggcgccggagctgctgggggccattgcggtggcggcgtactcctatatggcgctggtgccgctgatccagccgccgatcatgaaggcgctgaccacggataaggagcggaaaattcgcatggtgcagctgcgcacggtaagtaagcgggagaagatcctcttcccggcggtgctgttgctgctggtggcgctcctgctgccggacgccgcgccgctgctggggatgttctgcttcggcaacctgatgcgcgagagcggggtggtggagcggctgagcgatacggtgcagaacgcgctgatcaacatcgtcaccatcttcctcggactgtcggtgggggccaagctggtggcggacaagttcctgcagccgcagacgctggggatcctggtgctgggggtgatcgccttctgcgtggggaccgccgccggggtgctgatggcgaagctgatgaacgtgttcagccggcacaaaatcaacccgctaatcggctcggcgggggtgtcggcggtgccgatggcggcgcgggtgtcgaacaaggtgggtctggaagcggatgggcagaacttcctgctgatgcacgccatgggcccgaacgtggccggggtgatcggctcggcgatcgccgccggggtgatgctcaagtacgtgctggcgatgtaggccagcctgttcccgcggctggcaagccggccgcggagatttctcataaggagacggtgatgaatgaaggcatagcatgctgtccggaaaaccggacatcaacacgggaggcggtggttgacgccatgctggcgtcaggcgatgaacttgcacaactgcagccggcgctgaacctgctttcgcccccgctgaacgccacgcctggtgaagcgctgctggccagctgttatgaggccggcgctgaccacaacgctgacgaggcaacacgggcggtgagcgccttaccggcggcggtcgtgcgctctgcgacgccctcgctgcagcgcagcggtctgctgtgcatggcggccggggcgctcagcgcccggcaacttccactgacgcacaaccggctgtgtgacgtggcggggcagttcgcccgcgctatccctgaaggcgatgaagaggcgggcagtggattttataccgtgcgcagcgtgtccctgcccgtctaccggcggctgtggcgggataaccattctcacagcgtctgtctacagcaggcgctgctgcatttgctggcctggaagagtgattcgccctgggcgcggcagcaggcgcagcgtctgctctggcagggtggcgtgctgggtgagaagggggaatttgcgctactgacgctggatgatgagcttcgcgagcgacagatagtctggcccgcgctgagatcgctgctggcggtgaccgggtttctggtcagattcccggccggtccggtatttagcgattaacgtggctccccaaacggggagcgctatcgtaaaaaattacttcgctttaccctggttggcgacggcagcagctttcgccgcgatctcttccgcgttgcccagatagtaatgtttgatcggcttgaagttttcatcgaactcatataccagcggtacgccggtcgggatgttcagttcgaggatctcgtcttcgcccatgttgtcgaggtatttcaccagcgcgcgcagggagttaccgtgagcggcgatgatcacgcgctcaccgcttttcaggcgcggcagaatggtttcgttccagtaaggcacgacgcggtcgatagtcagcgccaggctttcagtggtcggcagttcggcgtcggtcagttttgcatagcgcggatcgtggcccgggtagcgctcgtcgtctttggtcagctccggcggagtgacagcgaagccgcgacgccactgtttaacctgctcgtcaccatatttctcagcggtttccgctttgttcaggccctgcagcgcgccgtaatgacgctcgttcagcttccaggatttctcaaccggcagccaggcctgatccagttcgtccagcacgttccacagggtgtggatggcacgtttcagcacggaggtataagcaaaatcaaagctgaagccttcagccttcagcagtttacccgctgcttttgcttcgctaacgcctttctcggacagatccacgtcgtaccaaccggtgaagcggttttcgttgttccactggctttcgccatgacgaaccagtaccagcttagttacagccattctctcactcctctctacacgccatccctcgcgccgcgaacggtgcgctgaatgtgatggtgtatgtgttattgattgataactattctcattatattgccgtgatttggcgcacggcaatgcttatccctaaccatagcgaaaatagtggcgcagtgtaaggtgcttgtaatacacaggttatttttttgtcctttggtgacggaaaatagagcaggttgctgaaaaaagaggcggcagagaggagggcggggacgaaaagcagcgccccctgatggagggcgctggcgattatcgggcgataaactgatattccgtcaggctgacgtactcctggcccggacgtaatacacagtccggctgcggccattgcggatggttcggcgaatccggcaggaattcgctctccagcgccagtccctgccagtcggcgtagggctccgtcgtctgcgacggggtgccgccgagatagttgccggagtaaaactgcagcgccggagcggaggtatagaccgtcatctgcagcttgccatcctgcgaccagacctgtgccgcaggctggctggcgtcgcctttggcatccagcaggaaggcatgatcgtatcccttcaccttttgctgatcggcatccgcgaggaagtcggcggcgatggttttcggctggcggaaatcaaagctggtgttagcaacatctttcagttcgccacccgggataccgtcgctttccaccggcagatacctctgggcgaggatctggagctgatgctggcgcacatcgccctgctcaccgtcgaggttgaaatagacgtgattggtcatattcaccgggcagggttggtccacggtggcgcgataggtaatcgcgatgcggttatcgtcggtcagacgatagtgcgcggtggcctgcagggtgcccggaaagccttgatcgccatcgggcgaggtcagggcgaacagcacttcctgctcgtcggcgcggacaatgcgccagcggcgcttatcaaacccttccgggccgccgtggagctggtggcccgcgtcgtttgacggcgtgacgttgacgacctggccgtcaagcgggaagcggctgtggccgatacggttggcgtagcggcctaccgaggcgccaagaaatgcggcctggcgagcatagtcttccagctttgcgcagcccagcagcggtcggcgcaggctgccatcggccagcggcacctcggcgctgagcagcgtcgcgccccagtccgccacggtgacggtcatccccgacttattgcgcagggtcacctgctgccatggccggccgtccggggccagcgcggtggtttgcgttagcattgcccggccccctgtgacggtttgcagacatagaatgtctctttaataccggttttcgcttcatactcgttggcaacggcctgctgaacggtatcgaccagatcttccgggattaacgctaccacgcagccgccaaagccgccgccggtcatgcgcacgccgcccttatcgccgatcgcggccttaacgatctccaccagggtgtcgatctgcgggacggtgatctcgaaatcatcacgcatcgaggcgtgggactctgccatcagctcacccatccgcttcaggtcgcctttttcgagggcgctggcggcttccacagtgcgggcattctccgtcagcacgtggcgtacgcgcttcgcgaccaccggatccagctcatgggcgacggcgttaaattgctcaagggtgacatcgcgcagggcgggctgctggaagaagcgcgcgccggtttcgcactgttcacgacgggtgttgtactcgctgccgacgagagtacgcttaaagttgctgttgatgatcaccaccgccacgcctttcggcatcgagacggctttggtgcccagcgaacggcagtcgatcagcagcgcgtggtcttttttgcccagcgctgaaatcagctgatccatgatgccgcagttgcagccgacgaactggttttccgcctcctggccgttgagggcgatttgcgcgccatccagcggcagatgatacagctgttggaacacggtgccgacggcgacttccagcgaggctgaggagcttaaccccgcaccctgcggtacattgccgctgatcaccagatccgcgccgccaaagtggctgttacgctgctgcagatgctttaccacgccgcggacatagttcgaccactgctgggtgtcgtggctgataatcggcgcgtcgagagagaactcatcggtctgattgtcgtaatcggcggcaatcacccgcacggtacgatcgtcgcgcggcgcacagctgatcaccgtctggtagtcgatagcgcagggcagcacaaaaccgtcgttgtaatcggtatgctcgccgatcaggttgacgcggcctggcgcttgaatgacattgctggccgggtagccgaaggcgtcagcgaacagggtttgggttttctctttcagactcatcattacactccggattcacgaaaatggacgtcgctgacggcgcgcagtcgttcggcagcttgctcggcggtcagatcgcgctgagtttcggccagcatctcataaccaaccataaacttgcggaccgtcgcggagcgcagcagcggcggataaaagtgggcatgaagctgccagtggttatggtcttcgtcgttaaacggcgcgccgtgccagcccatggagtaggggaatgagcactggaacaggttgtcgtaacggctggtcagctttttcaacgccagcgccagatcgctgcgctgggcgtcggtgagatcggtaatgcgctgcacgtgcgctttcggcaacagcagcgtttcgaacggccaggcggcccagtagggcaccaccgccagccagtgctcggtgtccaccaccgtgcggctgccgtcggccagttcgcgctgcacatagtccagcagcatcggctggccctgtgcggcgtaatactctttctgcagacggtcttcccgttccgcttcattgggcaggaaactgttggcccacacctgaccatgcgggtgagggttggagcagcccatcgctgcccctttgttttcaaaaacctgcacccacgggtagcttttcccgaggtccgcggtctgttcctgccacgttttaaccacgtcttccagcgctccaaggctcagttccggcagcgttttgctgtggtctggcgagaagcagatcacccgactggtgccgcgggcgctctggcagcgcatcagcggatcgtcactctccggtgcgtccggggtgtcggtcatcagggccgcaaagtcgttggtaaatacgtaggtaccggtgtaattcgggttggtgtcgccggtcacccgggtgttgcccgggcacaggaaacagtccggatcgtgggccggcaaggtctgttttgccggcgtttcctgcgccccctgccaggggcgcttggcgcgatgcggagaaaccagaatccactgtccggttaacgggttataacgacgatgtggatggtcaacggggttaaatacgctcatgaaggttccttagtctggataaccctgcggatgacgggactgccagtgccaggtgtcctgcgccatttcgtccaggttgcgcgttacgcgccagttcagctcgcggtcggccttggcagcatccgcccagtaggccgggaggtcgccatcgcggcgcggcgcgaaatggtagttaatgggtttgccgcaggccttgctgaaagcattgactacgtcgagcacgctgctgccgacgccggcgccaaggttgtagatatgcaccccggctttgtcagccagtttttccatggccgcgacgtggccatcggcgaggtccatcacatggatgtaatcgcgcacgccggtaccatcttcggtcggatagtcgttaccaaaaatggccagcgattcgcgacggccaacggcgacctgggcgatgtagggcatcaggttgttcgggatcccctgcgggtcttcccccatgtcgcccgacgggtgggcgccgaccgggttgaagtagcgcagcagggcaatgctccactccggctgggctttctgcaggtcggtcaggatctgctctaccatcagcttgcttttgccgtaagggctttgcggggtgccggtcgggaagctttcgacatacgggattttcggctgatcgccgtagacggtagcggaggagctaaagataaagttcttcacgccagcggcgcgcatggcagagactaatttcagtgtgccggtgacgttattgtcgtaatattccagcggcttggcgacggactccccgacggctttcagcccggcgaagtggatcactgcctcaatggcgtgatcgtggaggatctccgtcatcagcgcttcgttacgaatatcgccttcaataaaggtggcttctttgccgcctagacgttcaatcaccggcagtacgctgcgcttgctgttgcagagattgtcgaggatcaccacctcgtgtccctgctgcagcagttgaacgcaggtatgacttccaatgtaaccgctaccacctgtaaccagaactttcatgattcgctccattcggcttatcgtttgtgaggaagatagcatatcaaagaagtgaaaagtgtgacatagcacaagttagtggaatcgtttacacttggggtgtaaataacgtaaattttatattttgaattttaattcaatgacttaggtttgtttggcgctatttttctgaaaaataccagggatctttcgatccccggcagggggcgtcaggccacggggccgagctgataagtgtaaccgtctccactgggaacgaacgccaggcgatgggtaatacagtccggggcatcttccgcatggtgcgagacaaacagcagctgtgtggccccttcgccaatcaacacgtcgacaaagcggcgcaccagctggcggttgagggggtccagcccctgcagcggttcatcgaggatcagcagggttggatgcttcaccagcgcgcggacgataagcgccagccgctgctggccccacgacagactgtgaaacggcgcgtcggcggtgcgcttatcgatgccgagaatatccagccattgctgcaccagcttatgctgcttgtcggagaccgcctgataaatgccgatcgagtcaaaatatcccgacaggatgacgttgcggacgttggtgctgacccggtagtccagatgcaggctgctgctgacgtagccgatatgctttttaatatcccagatggtctcaccgctgccgcgccggcggccaaagagcgtgagatcgttgctgtagccctgcggatgatccccggtgaccaggctcagcagcgtagatttaccggcgccgttgggaccgacgatctgccagtgttcgcccggattcacggtccatgagaggtgattgatgaccgggcgatcgttataggagaccacgccgtcgttgagcacgatacgcggcgccgagtctgccagcgcatgacgggccggtgggacatccggctccggcagggtgatgccgtccagtttttcactgtgcgccagctgggcgaccagcgcctgctgcagcagggaagacttctcgccggtctcgctaagggtgcagtcagccagcacgccggcgaattgcacaaactccgggatctcatcgaagcggttgagcaccagcaccagggtgatgccggcgctgtgcaggtcggccagcagggcagccagctgctggcgggagttgacgtcgagaccgtcgaaaggttcatcgaggatcagcagttgcggatcggtcatcagggcctgacacagcagggtcttacgcgtttccccggtcgacaggtatttaaaccggcggtccagcagggcgctgatgccaaactgttcggccaggcgcgcgcagcgggcaggatctttcacctcatcctggataatctccgcggtggtgcggccggtgtcttcttcgcctgggctgagcaggtcggtgttgttgcgctgccactcgtcgctgaccagcttctgcaattgttcgaaggagaggcgggtcacgcgggagaaatggctttcgcgctggccgctgagcaggggcaggtcgccggccagggctcgcgcgagggcggatttgccgctgccgttgctgccgacgaacgcccagctttcacccgccgccacgctcaggtggtctatttttaaggtctttgtatcgctcaggcgaaacgtgccttgcgaaatttgcaatgatgacatgatgtatcccattttttgcagcgatgtgcatcagggatacgacttcagacgcgtaatgtcaatggggtcagcataacgtcgcgaggatgatgcgatcggcattgaagtaagcgatcgcctccgttccttccgccaggccagcggcctgcgcctgtggcagggtggcgcacagggtttgaccgtccgccagggtcatcagtacttcgcactgtccggacccgcattcgatatgactgatacgtcccgacagctggttatcagcctggcgggctgctgcgggatcgagggtgatgccgacccatggcgctttgagcaggaccagcacctcctggccctcatcgagtcccagcttctcagcgctttgcgcggtgatggcgacgttcaggcgggtttttccgtcagccaacagtacttccacgtgctgctgcacctgctggcgatcgcggccggtaatggtgccgaaccactggttgcgggcgctggtctgcagggaaaagcgcgagatggccgccagcaggctatccagcggcagggcatcgtcatcgctgagtacatcaaacgctttctgctggatctgcgccagcagatcgtacagctggatcagacgctgcccgtagcgggtcagcaccgcgccgccgccgccctttccgccggtggcgcgatccaccagcggctgttcgctgagctggttcatctcattgatggcatcccaagcgctcttatagctgatacccgcatgcttcgccccctggcttatcgaaccggtctggtcaatttgtttgagcagggcgatccgccgcggatcggcaaacaggcgctgctgtagcttaagggtaagaagaatttcggcctgcataatcgtttcctgacaaaaaagggtattgtgaccgatagtcgcccacttgcaaaacctctctgcgcggttggtcattacccaccgcacaaatgggacgtgttttttcggctgaaatcgttacaatcaggaaatcatactatctggagtgaaccatgttagagcttttgaaaagtctggtttttgcggtcatcatggtaccggtggtgatggcggtcatcctgggactgatttacggtcttggcgaagtgttcaacctcttctccggcgtaggccacaaagatcgcagccagcaaaatcactgatttcccggcgcccggtttaaccgggcgctgtgctatttccctcctgtatcatttcccttcgttttattgtcctgtatcactataaaaacgcttcgcatatcgttatattatcgactacataacgcattgacaggagagtaagatggcaggttcttggttacgcggggttgtcggggtatcactcacgctgtgcgtcgcgggtcaggcgctggcggcagagggtaaagtgaccgttttcgccgccgcatcgttaaccaacgcgatgcaggatattgcccaggcgtacaagaaagaaaaaaacgtcgaggtcgtgtcgtcgtttgcctcgtcttcgacgctggcgcggcagatagaagcgggtgcgccagcggacctgtttatctccgccgatcagaaatggatggattacgcggcagataaaaaggccatcgatccggcaacccgcgccactctgcttggcaacagcctggtagtggtcgcgccgaaagccagtgcgcagggggcgataaccattgatgagaaaaccgactggaccagcctgctgaaaggaggccgtctggcggtgggcgatccacagcatgtcccggccggtatctatgccaaagaggcactgcagaaactcggtgcctgggagacgttgtcgccgaagctcgccccggctgaagacgtgcgcggtgcgctggcgctggtggagcgcaacgaagcgccgctggggattgtctatggctccgatgccgtggccagcaagggggtgaaagtggtcggcaccttcccggaagcctcgcatcagaaagtcgagtacccgctggcgattgtcgatgggcaccgcaatgcggctgtgagcgccttctatgactacctgaaagggccggaagcgtccgctatctttaaacgttacggatttaccacccgctgatgtttctgagcgaacccgaatggcaggcggtgctgctgagcctgaaagtctcctccctggcggtggccttgagcctgccctttggcatctttttttcctggctgctggtccggcgcacctttcccggcaaggccctgctcgacagtattctccatctgccgctggtgctgcctccggtggtggtggggtacctgctgctggtggccatggggcggcgcgggtttattggcagctggctgtatgactggttcggcatcagctttgcttttagctggcgcggggcggtgctggcggcggcggtgatgtctttcccgctgatggtgcgcgccattcgcctggcgctggaaggggtggacgtcaaactggagcaagcggcgagaaccctaggggccagccgctggcgggtatttttgaccattacgttgccgttgactctgccggggattattgtcggcacggtgctggccttcgcccgctcgttaggggagtttggcgcgaccatcacgttcgtctccaatattcccggtgaaacgcgcaccctcccttcggcgatgtacaccttgattcaaaccccgggcggggagggggcggcggcccgcctctgcctcatcgccatcggtctggcgctggtttcgctgctgatttcggaatggctggcccgcgtgagccgccagcgcatgggaggataatgatgctggagctggactttacccagaccctcggtagccactgcctgcagatccgtgaaactctgcccgccagcgggatcaccgccgtctttggcgtctccggcgcgggcaaaacctcgttgattaacgccatcagcggcctgacccgaccccaggcggggcggatcgtactcaatggccgggtgctgaacgacaccgcgcagcgtatctgcctggcgccggagcagcgccgtatcggctatgtctttcaggatgcgcgcctgtttccccattataaagtgcgcggcaatctgcagtatgggatggcgaaatccatggtcagccagttcgataagctggtggatctgctggggattgcgcccttgctggatcgtctgccgggccggttatccggcggcgaaaagcagcgagtggctatcggccgcgccctgctgaccgcgccagagctgctgctgctggatgagccgctggcctcgctggacattccgcgcaaacgcgagctattgccctacctgcagcggctggcgcaggagattcatattccgatgctctacgtcagccactcgctggatgagatccagcatctggccgatcgtgtgctggtgctggaggccggtaaggtgaaggcttttggtccgctggaggaggtctggagcagcagcgtgatgcacccctggctgccggcggaacagcagagtacgatccttagcgccaccgtcgccgcgcagcacccgcagtatgcgatgacggccctggcgctgggggaccagttgctgtgggtcaaccggctcgaacgtcccgcaggcgacaccgcacggatccgcattcaggcgtcggacgtttcgctgacactggcccagccgtccgggaccagcatccgcaatatcttgcgcgccgaggtggctcagtgtctggaggtcaacggacagattgaagtgcagctcagagtgagtggccgtctgctatgggccaggattagcccatgggcgcgggacgacctggcgatagcgccaggtcagcaggtgtttgcccagatcaaaagcgtgtcgatcgccgcctgattacagcagttggcggtagataaactcggcgatgctggtggactcattgtcgccgatgactatgttggcgcgggctttcacctcgtccaccgcgttgcccatcgccaccccggtgcccgccgcttccagcatgctaagatcgttgtagttatcgccgaaggccatcacatcctgcatcgacagcccctggtcggccacccattgcgccaggcgtttgcctttgctgttgccggcgcgcgcgatatccacctgatcgtgccacgaccattcgcactcgaggcccagcgtctcgccaacctgctgcgcaaaccgctgcaggcggggaatgtcgtcatcggtgagagcgaatttccataccgcgttaacttcgcgaaccgcctgcgccagcgaatcgacctgagcgaaaactggacgctgatcttccggtaacgcctgcgcccagttgcgggtgcggatcacatgcccggtggggtgttcataaagcatcgcgtcgtccacatatgccaggccgtggatctgctgtttggcgagcatggcagtgaggcttaccgcttgctctaccggcataggatcggcggccaaaaccttttttgcgtgataatcatacaaataggtgccattacaacaaattgcaggtgtatcgagagccagtgcctgataaaaaggatggatagcgacgtgatgacgtccggtgacgacgatgacctgatagcctgcctctctggcgcgggccagcgcctccagcgacgcgggcagaatggtttttttgctggtaagcagggtgccgtctaaatccagggcaatcacgcgtgttgtcatgtgttatttccggttgatgttgaaaagtgacctggccatgatggtacaccgccgtggcgtcaggaccaatttttccacatctgccgtgaatgtctgtatgccctttgtgccgccgtccggcggaaattcggcggacgatgcgagtatcatgggcggatgtcttataattttcagggtgctgttatcctgaaaatgaaaattccacgtgcagtgagggaaggagtagtcatgaaacaaaccgtttataccgccagcccggaaagccaacaaatccatgtctggagtcttgaagcggacggcaaactgacgctggtgcaggtggttgatgccccagggcaggtccagccgatggtggtcagccccaacaaggaatttctgtacgttggcgttcgtccggagtttcgcgtgctggcctatcgcatcacgccggataacggggcgttaacctttgcgggcgaagctgcgctgccgggcagcccgacccatatctctacggatcaccatggccgttttgtcttcagcgcctcctacaatcagggctgtgtgagcgtgaccccgctgcacgatggcctgccgggcgaaaccatcaccgtggtggaagggctggaaggctgccactcggccaatatctccccggataatcgcaccctgtgggtgccggcgctgaagcaggatcgcatttgcctgtttaccctcagcgacgatggtttcctctcggcacaggagcccgcggaagtgacgaccgtcgagggcgccggtccgcgtcacatggtattccatcccaaccagcagtatggttactgcgtcaatgagctaaacagctcgattgacgtctgggagctgaaagatcctaagggcaacatcgaatgtgtacagaccctggatatgatgccgcctgattttagcggcgtgcgctgggcggcggatattcatatcaccccggatggcggtcatctttacgcctgcgatcgtaccgccagcatcatcacggtgttcagcgtttcggaagatggtagcgtgctggcggtggaaggctatcagcctaccgagacccagccgcgcggctttaacctcgatcacagcggtaaatatctcattgccgccgggcagaagtcgcaccatatcgcggtgtacgacatcgtcggtgagcagggactgctgcaggagaaaggccgctatgcggttgggcaggggccgatgtgggtagtggtcaacgcccactgaaccgccatcaggtaaaagaaaaaacctcgccttagcgaggttttttttgctcagagcggacaggctctgcggagaaggcgttgtcctggcgggccagaagcgtggcgacgttagatatcgtccatggtgtagccaacgacaatctccaacgtttttcggatcacgtccgcggtcaccacgtcatcggtggtttccagcgcctgaatcagccataaaataatggccttattgttcaggtgaccctcggactggagaatactgttgatggcgagcgacatgacggcggactcatcaaccagtttatcaccggcgttacggaaatagtcggagagcgcggtgtcctgcagtcttgcgtaaatatctggttgctgatgcatagtctgtctcatcacattctcactctgtttaattcaccatggttgggataatcagtggatctttttagcttccgacggcatgctgtctggcgccagcgaacctctggtttcccaacggccattgattttctttacctgtaaaggcgcgtacttccgctgacggataagcttcgcgcaaatttcttcgatcacggcagcgatgatctttctacgctggcgatctggttctgtcgcctgcattaaccgaagtcgaaccagcagggtcggggtggtaatcgggcgattcgttttcagaagcgctagaaccgcctcgccgatgatttcatcggttatttcctcagtttcactgttattcataaccgtctctatgcatgccacccttttcctgaataggcgaacgggcattcaggtcagcagcaggtttgtggaagcgatcgcccctcatctgctactgcggcgctgcaacaggcgacgatcgatgacgttattcctggtcagcaaacagcagaccaattaaggtctgatagtggctctcttcctccggcgcgcgagcgcggtccaggcggctcaacagtttggtgcatagcgctttgcggttgagatgacgcccttcgttaagaatatccatcacgatctgacccagggtttcctgctgggaaggcaaagatgctttgttgaaatactgggcaattgcgttcgctgtatctggaatgtaaccattctgctgcatatgtgctcctttcatttcattcatctgttaactgccattaaacttatacaataattattaacctgtacacacaaagttgcacaataatgattcatgttagtttaactatatgatttttaattgtttaattttttttgcctggcgcggttctggcttgtaaaggtggggtttagcgttgcatgttgtacaaggaaagaaaaaaagggaaaaccttgcacaaaaaagggatttttagtgtatcttttttgttaagacaaaacgtagttttacgagacccttagcctgataactgctactgtgaatgcttatccctcccatctggaatcactatgctaaccaccatcatttatcgcagccatatctgcgacaatgtctcattcaaatcgatcgaggccatggtcgccagggcaaacgaaagaaatgggcaggcggacgtcaccggtattttactttttaacgggacgcatttttttcaactcattgaggggcctgaagaaaaggttcaggatatttatcagcatatctgccaggatcctcgccactataatctggtggagttgctttgcgattatgcgccgtcccgtcgttttggtaaggtcgggatggaactgtttgatttacgcgaacacgatcgcgaggaagttctgcaggcggtgatggaccgggggacgtcaaaatatcagctcacctatgatgaccgggcgctgcaatttttccgtacttttgtcgaagccacagaaaaagcgaactattttgagattccttccgcagatagttgggtttttattcctgataaggagacgttctatcctgataccccgattatcgataatacggaaggttgttcctttgccttccagccgattgtcgaccctttcgcctgcgaaattatttcgtgggaagcgctgttgcgtacaccggacgggcaatcccccggcgcctattttgccgggctgaccggggacgatatttatctcgccgacctgcacagtaaacgggtggcgttgtcgctggcgggaaaattaggtttacgtaataaggcgttaagcattaatttactgccgatgaccatggtcaaagcgccgaatgcggtggctttcctgctcgacgaaattagtcgcaatgaccttattccggagcagattattgtcgagttcactgagcgggaagtgatttcgcggatggacgattttaccgatgcggtgcgcaaactgaagggcgcgggaattaatcttgccatcgatcacttcggcgccgggtttgccgggctatcgctgctggcgcaataccaacccgacagaattaaaatcgaccatgagctgatacgcaatatccaccaggacggaccgcgccagtcgattgtacaggcgattatcaaatgctgtacttctctggagattgcggtctcagccgtcggcgttgagcgtgctgaagagtggatgtggctggaatcagccggtatttcacagtttcagggcaatttgttcgccagcgcgcgcctggggggcctacccgccgtcgcatggccggagaaaaaatgaaccaccgcgaaatcaactaaacattttttcatcttttttcccgggcgctgtgagccgcaacctgatatctttatctgtacaagaaaatagagttgtacaggatgcctgaattcgttagtttaggtattaaggtatcaggttgatgtgaggctgctatggcgttttacagtatcggtgaagtcgccgaacgttgcggaatcaatccggtcacactgcgcgcctggcagcgtcgttacggtctactgaaaccgcagcgtagcgaaggcgggcatcgacaatttgatgaagaagatatcctgcgtatcgaagagatcaagcgctggatagagcgcggtgtatcagtagggaaagtcaaagcgctgctggaggataacctgccggcggcgcgcgacgaatccgcgcatcttcaggaagagatgatgtccattctgcgttatatgcagcccgccagaatccgcgccaaattaatggcgctcagtcatcaacaccccgtcgacaccctcatcgatagcctgttagtgccggtacgacagcgtctcaagctggatcagaatacctcgctggtgattagcagcatgctggacggcctgttaattgactgcgtagcgttgtttctcgccgaagcgcgtaaaaaaaatggcaaagagacgctgctggtgggctggagcaatgaggacaggacgcgtctgtggctggaggcatggcgtctttcccaacgcggctggcatgtcaacgttctcgccgaaccgctggagtcgccgcggcctgagctatttcccgggcagcatattttcgtctggaccggacgtgccgccacgcctctgcaggaggagttgctcagccactggcaggagcagggcttcagcatccattttcacggccaaaattaagcgccccgatccgtggtgcggatcagggcttgagtgctgggttacaggtgaatctggctccaggatttgaacgtttcgctgcggctgatattaaaaaaatcggttctaccgctgcagccgagctttttaatcagattcagccggatctgataaatggtttttatatgcaggtttagcgaccggccaatgctggcgaccgcttcgccattgctgataagttgaataactttcttttcccgctcggtaaactgcaccgaggcgcctggcgccggatgggttttgtaatagcgggtgggttgatgcagaaatatctttaactcttccggcgtcgagttggccggtaagcgcagcataggcagttcactaagaaaattaagatcgttgccttcggttaacagaataaataatgtatcccgccgattatagttgtgctgcagtaccgcgaaataattgtcgctggtgaagaaaacatgttttttgcggaagtaagatgccggcaggctattcaggatcagcgacatcccatagagaagaaaaccattatcaaaccacagatcgtaatgctcagaacgatagcaagtattatggtgtgacatttttttgcctcagttagccgatagagacccaggcgcgccggtacagcaggtcgaagcctgctgccagcacagtgggtttatttaatgatgaggtttgctgtacagcatatccagcgcctgcagatagagatcggaaagtatttcgttactttccgtttgcagacgatgctggatttccgtaatcatccgctcattatttaccgttctgtgctgcttaatgagcgtattctcaatattcttcatcagggccgaattgaagacaaactctgctggaatggtatttttaatatgcatagctcgaactctcccacgtataaagcaaacagacaataaaagtcgcagcgtaccgttggtacgcgccaagtcacgaacaggaaatgtataaccaggaaccaccgtccgactcgctgcgcaatcgtcaagcttccccgctttgttgcgcaacaagcagttaacactccaaaactatagacgctgatttcactatgtacaacttttttcattactatatgtacaacgtaacggcttattttttgtgtgtgttttaatttgttgatttataataattttattaagtgataacttgtacagaaaagtcgggttgtgcaggatttagctgtaaaaccagcgggaagaagctgatgatggtagaagaaagccaattgtgaaaattctgtcatggctggcgaaatgcatgaaattgcgccgacgcgcgaaggggtaaacagcaacgctgtcgtcgacaggtggctttcttccgcgtcggagtctgagcatagcggaaaatatgatgaggctttgtctgctttttgcacagtaaggtaaaggggtaacgtctgccatgtcgtaaacggcccattcgatttgttggcgaataagggctgtgctacgctttttggtaacgacgcggcggtttggcatcgttatttttcccccatttccctgtcgagtcttatacccctgtcacgaccggtaaatacggcaaaatctttctgtccctggacaggccttgaggactgaggagggaaaatgcgcggcaaaagcgtgatgctcctggccgggttagcctctctcgcgcaggcgaacgaacttaacctctattctgtgaataccggttcctatgtttaccatctgaccaataatcacggacaatatacagagaatttcgaaaatcattttttctcagtggagcggaaattctctgcagactccaaatacagccttctgcttggcactatgaataacagcttcaacgatcgctgcctggcgctgggggtgagaagagactggtaccacagcggcagcgggtggaccttcaaaggcgtttacggctataccggcgaattcttcttcgacgccttcgagcattgcggcgatcatggctcctataaagactttaaggacgccacggggatcggcttttcaccctatatctaccacgctatccagtataacttcaccgattatttcgccgttgaaagcggcattattattcccagcgtgtttgtgattagtatccagtggagcttccgctaaatcgtcccgttgtcggttacaaggtaatcaccttcctgagcagcgtactggagagcgcggcaagggaaatgagcaccgacaggacaaaggtcagcgctattacccccaacttggtggctagcgaatgcacagggataagcatcaccagcaggtgaaacacggaatagtggaggatataaactccggtcatcgctttactgaccgtcgccagcacggcctctttccactcgcggttctttttaaactgcacggcgttagcggcgatcaccagcaggacgatcaggatataaatttgcgatcccgtgagaatgaacgcattacgatctgctttaaacagggcgaagaagaaatggcgttcataaaaccaggtaaataaatagacaaagggcagggcgataatcgaccctttaatcacctgtgggttgcgtatccactccgcgacctttggatcgttaaacaactgcccggttaaataaaacagtagccatgtccacaggcgatactgcggcggcaaactgaaaagatgtctgtccgggtagatcaccgagagcaggtcgtaaccgtaggagcagcacagcagcgtcaggagcacggcgaaaaagagcccgcgccgctggctgagccaggcgatcaaaggatgaaaggtatagatgacaatcagggcgaaaataaaccagggctggatcaggtagccgcgctggtaaggctcccagacataatagaccgtcacccaaaacagaaagacgatgaccacgcttttaattttaccaatttgccagttggcatcgtggcgcgtctgcgcatcaagatagccggccacgacaaaaaacagcggcgtcgcgatggtcgagataaatgtcagcagcccgaggatccagtgatagtcataatcaaagcgatcccaggtgttatagatggtgaaaaaggtcaccgctgtcatacagcctaatgtcttgataatgctcagaccggtactgttcatcgttgaggcgtcatatccttatggtgaaagcaggcgtaaatcaccggcagaaccagcagcgtcagcacggtggcaaaggcgaggccgaacatgatcaccaccgccatactctggaaaaagacatcgcgcagcagcggggccaggccaagtacggtggtgaaggcggtcagcaggatcggccgcagacgagaggttgccgcatcaataatagcttgtcgttgatctttctcctgtttttgttgctctatctcttctaccagcacaatgccgttacggatcagcataccgctcaggctgagcaagccgattaaggccataaagccgaaggggatgccggtaagcagaaagccgggtgtgaccccgatcagcgccagcggaacggtcagccagatggcgacggcgtttttcagcgaactgaacatcagcaccgttatgataaacatcaccagatagccaagcggcagggttgtaaacagcccctgctgcgcctcactggagttctcggcatcgccgccccattcgatacggtagccgtggggcagcggcagtgcgtcaatgcgcggtttcacccgcgcgagaatatcacccgaggtttggccgcttagcgggctggggtcggtctggaccgtcagcacccgggtacgatcccggcggaggatcaacggatcttcccactccagggcgaaaccattgatgacgttactcagcgggatatattgctggcgactctggctccagaccagcacattattcagatggttggcatcctgacgctctgcttccggcggccggacgatcactggcagcagatcggccccttcacgatataacccggcgcgactcccggagaaattcatctccagcgcgttatcaatatcctgtttatccacccccagctcgcgtcccagcgccggggaatactgcgggcggatcattttgctgcggttctgccagtcattacgcacgctgtcggtcgccgggtccgcggcgaggatatcgcctacctgactcgccagcgcgcgcagcgtatccgggtctgggcccttaatgcgcacctcaatcgcgctatccccggagggcccgaacataatgcgtttggtgctggcgttaacctgcgggtagtttctggcaatccagtcctccacgtggcgggtgacaggggcgatgccgcgttgatcatccatccgcaccataatctgcgcgtagttgctgtactggcgctgcccgctgtaggtgagaatgaaacgcatactgccctggccgatggtggagacggtggtgaccacccccggctgaccggctatcgaccgctcgatatcccgggtcatcttctccgtggcgtttatatcggtaccgtagggtagccacaggtcgacaaagaatataggcgtattcgatgacggaaaaaaattctgccgaacaaaggtaaagccccagatcgctccggctaacagcgcacccatcagcaccagggtcagggtcttttgctgcagcagtattcgcagcgtctgctgatagccacggtaaaagctgccgcggtaaggatcggctttttcctccgcggcggcggccgacggggcgtttttaaacaaccaccacttaataagcaccggggtgatggtcagagcggaaaaccagctcagcatcagggagatcagcagcacctggaacagcgatttgcaatactccccggtagagtcctgggaaaggccaatcggcgcgaaggcgaggatggcgatgatcgtcgcgccaagcagcggcagggcagagcgacggatcacatagttaatcgcgcccagcagcggagagccttgctgacgggcgatgagcaccccttcgacaatcacaatggcattgtccaccaacatactcagggcgatgataagcgctccgagggagatccgttgtagttcgatcccccagatatacatgataagcagggtgccgagaacgttgagcgccagcgacagagcaataataatcccgctgcgcacccccataaataccagcagcacgccgacgacaatcgccagggccatcagaaaattggtaataaagccattgaccgagtgggcgacctcagctgcctgatcgtaaaaaatatcgatgtcgatgcccgccggtttgtcggcggccatctgctggaggcgggcctcgagagcgtggccgacgtcaataacgttgacgccagggataaaagaaactcccatggtcaccgcctggcgcccgttggcatgatagatactggccggcgagtcggttagcccgcgcgacagcgtagcaatatcccgcagtcgggtggtggcgctggcgccgtgagggctgaccagcagatctcccagctcatcgatgctctgaaactcaccggtggggtggaggcggatcgattcgctgccaacgcggatctccccggcgctggacaccacgttgagtcgggccaggattgcggcgagctggttgagggtgatcccgcgcgccgccatcttcgccagcgagatatccacattgatctgctgcggaatgacgccgccgatagcgactttaccgacccccggcaccagcaccagctcccggcgcaactgttcggcatagcgcaccagctccgggttggtaaaactgtcgcccgagatagcgaagaaaaagccaaacacatcgccaaagtcatcgttgacgaaaggggggactacgccaggggggaaaaggcggctggcgtcaccgacccggcgacgtagctcatcccagatttgcggcagctcgctggaatggtactgcgaagcaatattcaccgtaatttgcgataagccattcgaggagatggagctgacgttatccagcgagggaagctgctgaatcgcgttttccagcggcagggtaacctcctcttccacctgctgagcagacgcgccagggtagtgggtgacgatcaccgccgttttgatggtgaaggcgggatcttccaggcggccgatattgagcagggcgaacaggccacccacccctaacagcaaaatggctaaccagacgcgggtcgggttgttaataaactgacgggaaatatccatttataatcctcgttcacgcgtccagacccgcaccggctgcccggcatgcagctcgctcacgcccgccgcaaccacctgttcacccgcgcggagaccgtcggtgatcgccactccctgcgaagtcacctcgccgacggtgaccttacgctcctcaagatatcgatgcgcgttatcgcctttcaccacccagactaccggctcgttctttggccggttatcggggttaaacaccgcctccgctggcacaatgagggtttcccgtccggcgctggccggtaaattgccgagattgaccgtcacggtgccgctgaccccgccgacggcgggaaaatcatctggccgcggcatggttaacacgatctgccaggtgagggtgctattgtcgctgctgccggtatgctctttgtattccgcggtaaactcgcggcccggcagggtattgatcctgacgacgggacggtaggcggtattgcggatatccagggaggtgaacagattttcgggaatgctgaagaccacatccagcaggtcggtccgcgtcagggtgatcaccggttggccggcggcgaccacctgatggttgcggatatgcacgccggcggcaatcccgctaaagggcgcgatgaggctcatttgcgccagctcttcgcgagcgatttttaaggccgcattggcggcatcgcgattggcgcgctgcacgtccatctccgcctgggaaatcgcctggcgcccggccagagtctggaagcggtcgaactgacgctgggcgagagtggccgccgtttgccgctcattgacccgttgctgggcctcgcgggcattcaggcgcgccagcgtttgcccctgggcgacgcttgccccctgacgaatatctagcgactccacctggccaccccgcttaaacgacagttcggtggaatcgccagactcaatgcgtgccggaaacgttcgctgctgggtattgcccacggcggtcacctgcgccactttaaccatgcgcggggcggactcgacggtgggtgctttctgatcgcaagcggttgtaaatataataacaaccgggatgagagaaaaataacggttcacaatattcccctcagattcaggatttattttacatttttattacatggcgcctgcttattctgcgagagcggcgacgaccagataagtgaagagccccaccgctgtgcaggcgacaatggccagcgcgacaaacaaacccaggcgtaacaggctataacccaacataatttcctccctttactcccacccgaaccgtgaatgtcatttaattcggcccccactgtgaccaccggacattcggagcggcatgcctgcttgtaatcagcatagtcggagaaaatatgaagtgttaaaaaagagaatgccgcgagcgttggcggcattgaggggaaagcgcaggagatccgcagagaatatgcggtttttataatatttttcagtctattaatccgccattttctaatgttaattttcctgtgctacgtttaataacatctattccgctcgccgcttctgttgttgagatttcgttcctccccaagtaaggggctattcatcactacgcattgtattggtaataaaaggattatctcatgtataaaaatatcgttgttcccgttgacgtgtttgatgcgggcctggccgacaaagcgctctctcatgcgaaattcctcgcccaacattctgccgggcaaattcatcttatccatgttattccggccttttctcctgtattaacccgcggatttatctctgatgcccgaaagatggaagaccatttgcttaataccgctaaggaaaagctgagcgagctggtgaagaaaaatgggcttgcggaagacgccagccatctttatgtgcgcagtggcaatgttcgcgatcaagtgattgccctggccgatgagctgaaagcggatgtggtgattgtcggttcgcgcaatccgggtatccagactcatctgctgggctcggaagcggccaatatcgtgcgctatgcccatgtaccagtgttcgttgtgcgctgatgatggcgggatgtcgccctgacttccgcttcagaaatcgagggaaagagtatgaatacagataaaccgggggcgccctattatcagcgctccgtcgaggagactctcgccagcgtgcagagttcgccggaagggattagcggaacagaggcggctacgcgcctgcagcagtatggcgaaaacgccctgccgcagaagccgggtaaacccgcctggctgcgttttattgcgcattttaacgatgtgctgatctatgtcctgctggcggcagcgttgctcaaggcggtgatgggccattggatcgacatggcggtgatcctcgccgtggcggtggtcaatgcgctgatcggcttcattcaagagagtaatgcggaaaaatcgctgcagagtatccgcaatatgctgtccagcgaggcggtggcgatccgtcagggcaaccatgaaaccatccccaccacctcgctggtacctggcgatatcgtggtgatccgcgccggcgaccgtatccccgccgatctacgggtgattgaggcgcacaacctgcgggtggaagaggcgatcctcaccggcgagtcgacggtggtggaaaaaaccaccgagccgctaagcggcgatttaccgctcggcgatcgcagcaacctgttgttttccgggaccaccgttagctcaggggcgggaaaagggatcgtggtggccaccggcggcgataccgagctgggccatatcaaccaaatgatggcgggcattgagaaacaccgcacgccgctgctggtgcaaatggacaagctgggcaaagccatctttatccttattctggtgatgatggcggcgctgttcgtctttagcctgctgttccgcgatatgccggtctccgaactgatgctgtcgttgattagcctcgcggtggcatcggtcccggaagggttgccggcgattatctcgattattctgtcgctcggcgtacaggcgatggcccgtcagaaagcgattatccgcaagctgccgacggtggaaaccctcggcgcgatgacggttatctgctcggataaaaccgggaccctgaccatgaacgaaatgacggtgaaggcggtgatcactgccgacagcgtctatcgggtggaaggggatagctatgagccggtcggtaagatccacgccattgacgatccgacgccggtcacgatcgcgcccggctcgctgttcgagcgctatctgcgcaccatcgatctgtgtaacgacagccagcttatcaaagaggagagcgggctgtggaaaatcaccggcggcccgaccgagggggcgctgaaggtgctggcggcgaaggtcactctgccgccgctgaccagcgaactgcgcagtaaaattccttttgattcgcaatataaatacatgtcgaccctctaccggctgggtgaagaggaggtagtgctggtcactggcgcgccggatgtcctgttccgcctgtgccagtatcagcagagcgacagcggattgcagccgctggatctcccgtactgggaaggcaaaattgaagagtacgcccgggaagggctacggatggtggccgcagcctggaagccggctgccgcaggccagaccgaactgacccatcaggatctgcagcaaggggtgattttgctaggggtcgccgggatgatggatccgccgcgtccggaggccatcacggcgattgccgactgcctgcaggccgggatccgcgtgaagatgatcaccggcgaccacccgcaaacggcgatgagcatcggcaagatgctggggattggcaatgcgggaaatgccattaccggacgcgagctggaggtgatggacgacgcgcagctgagcgtagccgcgcagcagtttgatatcttcgcccgcaccagcccggaagataagttccgcctggtgcaggctctgcagagtaagaaagaaattgtcggaatgaccggcgatggggtgaacgatgccccggcgttgaagcaggctgacgtcggcgtggcgatggggatcaaggggaccgaggtgaccaaggaggccgccgatatggtgctgaccgatgataacttcgccaccatcgccagcgcagtccgcgaggggcgccgggtgtatgacaacctgaagaaaaccattctcttcgtcatgccgaccaaccttgcccaggggttactgatcgtgatcgcgctgctggcgggcaacgtactgccgctcacgccggtgttgatcctgtggatgaacatggccacctccgccacgctgtcgtttggcctggcgtttgaagccggtgagaaaaatattatgcggcggccgccgcgcgatccgaaaattcacgtgatggacggctttgccatctggcgcgtagcgtttgtggggtcaatgattgcggtcagcgcctttattctcgaagcctggctgcagccgcgcggctattcgccggagtttatccgtaccgtgctgttgcagactctggtcaccgcccagtggttctatatgctgaactgccgcgtatcggatggattctcgttaaccaaaggtctgctggccaacaaagggatctggatcgtcagcggcgtactgctgctgctgcagctgctgattatctacgcgccttttatgcagatgctgttcggcaccaccgggctgccgttccgctactgggtgatcacctttatcatcggcttcgccatgttcctgatcgtggaactggaaaaaccgctgacccgcaaatggcgttccgcctgacggcgtgaagcgctgaacgaaaaagaaaagagggggcatcgccccctctctggctgacgacaaacctgtttcgtcattgtgctcgcatttctgccgggtggcggctttcgccttacccggcctacgaaagacttcaatatcaaaccgttatgcagttatctgtagggccgcacaagcgcagcgccgccgggcaattcctgaagattgcacgttgtcagcagtttgagagagggcatcgccctctcttttattatggttcacgcttgttgcgctttactgtttcggctcggcgaccacggtgcttcccacgccgcggttattgtactcccacatgcggttgaagccgttgtcgttgaggttgcgctgcagattgcctttgtcatcggcgctgccggtgttgccgctgaacgggcggccggagcctaccgccgccgcccacggctgggcaatattaaagccttcattgatagcgctgtcgcggatcaccacctggccgttgctgttgccatcgacgtccagcgcgcggccgagctgcgcgacgttatccccggaggcggtgaagcggctgttggtcgccaggaagccgtaggtcacgctcttcagagtagccggcgcgaagacataagcctctttctgggtacgggagttcaccacgcggaaatcggtgttatcaaacaccaccgcgcctcggccggaaacgatatccacatcgccttcaatgtagctgttggtcaccagggtgcgggtctgacggttgtcctgcagacggttttgcacgccgctgttggtcacgaagaaggtgttctgacggccaagaatattgaccttattgatctgcacctggtcgccatcgctgcgcaatgccaccgcctggtgggtaccggcgtcaacgctgtcgccgaggttgttggcgatggtcaggttctgcagctgcagaccattattctgtgaccagaagactgcggaacacattacgccgacggtcgccgcggatttgctttggcaactgtcgaacatataccacgccggtttacccggcatatatttaccgcctggattgaccagacgacgccaggtgttgcgatccatctcggaatcaatggcttcgctgattttcacgtcgattggcttatcgccagtaccatacagggtcagggcgcccggcgccgccggaacgtagacggttcccgggtactcgcccggcataatcgcgatatacagacgacggttagagtgacgggcaattgccgcatccaccgccgcctgaatggtggtatgggttacgccctgggttcccgcagggccgacgataaagtcaggctgcgccggcaggctgatggcagacggcgtccaggcggcggcgttgggagccagcgactggaaataggccgccggcgtgaagtttttcgcttcttcggcgttgagtatgggacgcgcggtagtgcccggtgcagtctgcgttgagggctgttgatcggcaggcgtcgagctacaggcggacagcgtcacgccgaaggccagcgccagcgccagacgggaaacggaatatgtgttcatgttgctccgggcaaaattaagcgtagtgaaataccccggctgagacgccagggtataagtcctttaaaacctgctgttttatactaacttgaacgaaacgggaagacgtggacggaaaaacttaccgtctttacgcaacgcgcagcctgccggatggtctttagtcacaaaaaaataacatttccctgcgctattgttgactttaccggcgttatgaaaataaatgtctatacaacccatgacaagttaagcgctatgactgaagccacttccgaactcgttatctggcgaaacgggcgtctcgccaccctgaaccccgatcacgctcaaccttacggcctgctggagcgccacgcgctgctggtgcgcgacggccgcatcgcggcgattgtcgccgaagatgacgtccccagcgggcgcagtatcgatcttgaaggccggttggtaacgccgggattaatcgactgccacacccatctcgtcttcggcggcagccgggcccaggagtgggagcagcggctgaacggcgtgtcgtatcaaaccatcagcgccagcggcggcggcattaactccaccgtgcgcgccacgcgcgacagcagcgaagctgaactactggcgctggcccagccgcgtctggaacgcctgctgcgtgaaggggtgaccaccctggagatcaaatccggctacggcctcgacctgccaaacgaacgcaaaatgctgcgggtcgcccgacaactggccgatcataatggcgtggaactgtcggcgacgctgctctccgcccacgccacgccgccggaatatcaaggcgatgctgacggctatattacgctggtctgcgagaccattttaccgacgctgtggcaggagggactgtttgaaagcgttgacgtcttctgcgaaaacgtcggcttcagcccgcagcaaactgagcgcgtctttcaggcggcgcaggcgctgggcattccggtaaaaggccacgttgagcagctctcgtcgctgggcggcgcgcagctggtgagccgctatcatgggctttccgccgaccatatcgagtatctgacggaagagggcgtggcggcgatgcgcgaaagcggcaccgtggcagccctgctccccggcgcattctacttccttaatgaaacccgtaaaccgccggtcgagctgctgcgcaagtaccaggtgccgatggcggtggcgaccgatttcaaccccggcaccagccccttcgccagcctgcatctggcgatgaacatggcctgcgttaagtttggcctgacgccggaggaggcgtgggccggggtgacgcgccatgccgcgcgggcgctggggcgccaggccagccacggccagctggcgccgggctttgtcgctaacttcgccatctgggatgctgagcatcccgtcgagatggtgtatgagccggggcgcagtccgctctggcatcgcgttgttcaaggagagttgcaatgatgctgtggcaagctacgccagccagtctctggcagggacgcgacgacagcgcggaagcgcccaatgcgctgcgcctgttccagaccatcgtccgcgcggaacgcttcgcgccgcaggagatgcccggcgatatcgcgctgctcggcttcgcctgtgacgaaggggttcggcgtaacaaggggcgtaccggggcagcggacggcccggcgaccctgcgccgggcgttggccaatatggccagccatcagggtcatgaccgctgcgtggatatgggcaccatcagcgtcgacggcgagcagttagaagccgcgcatcaggcgctgcgcgaggcggtggccgactgtcagcgggtgggtaaacgcacgctggtcctgggcggcggccacgagacggccttcggccacggcgctggggtactggatgccttcccgggcgaaaaagtgggcattattaatctcgatgcgcatctggatctgcgctttgccgactgcgccagctccgggacgccgttccgccagttggcgctggagtgtgacgcgcagcagcgcggttttcactatacctgcatcggggttagccgggcggcgaacacccaggcgctatgggatgaagcggcgcgccgccaggtggctatcgttgaagatctggaggtgctgacagccttcgaaactcgcgtgttgccggagcttgagcgcaatatcgcgcaattcgaccgtctgtatctgactatcgatctcgacgtactgccggcgcgagaaatgccggcggtgtcggccccggcggcgctgggcgtgccgctggccacgctgctgcgcatcgttgagccgctgtgccgcaacggtaagctgcaggcggtggatctggtggagtttaacccgctgtttgacattgacggtcagggcgctcgcgcggcggcccgtctggcatggcaaatcgcccattggtggcgctagcgatccgcgctattattttcgtttcgccgctccgcttattacgcataaggaaagccaggccatgtttgcacaacaacctcgttccgcgcccgcgcctttctatgaaaaggtgaagcaggcgatcagcgaaaagatccacagcggcgtctggcgaccgcatgaccgtatcccgtcggaagctgagctggtggcccagttcggcttcagccgaatgaccatcaatcgcgcgctgcgtgagctgacggacgaaggcctgctggtcaggttgcaaggggtgggaacctttgtcgccgagccgaaagggcagtcggcgctgttcgaggtgcgcagtattgccgcagaaattgtcgcccgtcaccatcagcaccgctgtgaggtactcctgcttgaggagacccgggcggatcatattcaggcgacggcgctcagcgtcccggaaggcacccgcatctttcactcgctgatggtgcattacgaaaacgaggtgccggtgcaaatcgaagatcgctgcgtcaatgccgcagtggtcccggactatctgcatcaggactacaccgccaccacgccccatgattacctgtcgctgatcgcgccgttaactgaaggtgaacatattgttgaagcggtgcaggccacggcggaagagtgcgcgctgctgcatattcacgcccacgatccgtgcctgctgatccgtcgccgcacctggtcgacaacccacatcgtctcccacgcgcgcctgctgttccccggtagccgatatcgtctgcaggggcgctttggctcctgatccacgctggcgtcagcaaaacgtgattgctgacgcaatataacaaaattgtatcatttctgttaaatcctggcttgcgcatgcttgtatagacaagtatatgtatctacgtaaacaacgttcattgtcaggagaaaccccgatgtcgcaaagcaaatatcgccagctggacgtccgtgcgccaagaggcacgacgctgaccgcgaagagctggctgaccgaagccccgctgcgtatgttaatgaataaccttgatcccgatgtcgccgaaaacccgcacgagctggtggtctatggcggtattggtcgcgcagcgcgcaactgggaatgctatgacgctatcgtgaaggcgctgaagaacctggagagcgatgaaaccctgctggtgcagtccgggaagccggtgggcgtattcaaaacccatgaaaactcaccgcgtgtgctgatcgccaactccaacctggtcccgcactgggccacctgggaacactttaacgagctggatgccaaagggctggcgatgtacggccagatgaccgccggcagctggatctacatcggcagccagggcatcgtgcagggtacctacgaaaccttcgtcgaagccggtcgccagcactaccagggcagcctgaaaggccgctgggtattaaccgccggtctgggcggcatgggcggcgcgcagccgctggccgcgacgctggccggcgcctgctcgctgaacatcgaatgtcagcagagccgcatcgatttccgtctgcgtacccgctacgtggatgagcaagccacctcgctggatgacgccctggcgcgcatcaaaaaatacaccgccgaagggcgggccatctctatcgcgctgtgcggcaacgccgcggagatcgtaccggagctggtgaagcgcggcgtgcgcccggatatggtcaccgaccagaccagcgcccacgacccgctgcatggctatctgccgaaaggctggagctgggaagagtatcagcagaaagccgaatccgacccgcagggcactattctggcggcgaaacgctcgatggccgatcacgtgcaggcgatgctggccttccatgagatgggggtcccaaccttcgactacggcaacaacatccgccagatggcgcaggaagtgggcgtcagcaacgccttcgatttcccgggcttcgtgccggcctatatccgcccgctgttctgccgcggtatcggcccgttccgctgggtagcgctgtccggcgatccgcaggatatctacaaaaccgacgcgaaagtgaaagagatcatcaaagatgatcagcatctgcaccactggctggatatggcgcgcgagcgcatcagcttccagggactgccggcgcgtatctgctgggtcggtctggagtggcggcaaaagctcggtctggcgtttaacgaaatggtgcgcagcggcgaagtctccgcgccgatcgtcattggccgggatcaccttgactccggctccgtcgccagcccgaaccgcgaaaccgaagcgatgcgcgatggttctgatgcggtctccgactggccgctgctcaacgccctgctcaataccgccagcggcgcgacctgggtgtcgctgcaccacggcggcggggtaggcatgggcttctcgcaacactccgggatggttatcgtctgcgatggtaccgatgaagcggcggcgcgtatcgcccgcgtcctgcgcaacgacccggccaccggcgtgatgcgtcatgccgacgcggggtatgagattgccattgaatgcgcagcagaacagggtctgaatcttccgatggtggcggcaacgcaggggaacgctaaatgaaatctttaactttgatcccgggtcaactcagcctgtcgcagctccgcgacatctacagccacccggtaaatattaccctcgacagcggcgcgtttgccgccattgacgagagcgtggcctgcgtcaacgccatccttgccgaagggcggaccgcctacggcatcaacaccggttttggcctgctggcgcagacccgtatctcgacggaagatctggagaacctgcagcgttcgctggtgctgtcccatgcggcgggcgttggcgagccgctggacgatgatctggcgcggctgattatggtgctgaagattaacagcctgtcccgcggtttctccgggatccgcctgagcgtgatccaggcgctgattggcctggtgaatgccggcgtgacgccgtggatcccggccaaaggctccgtcggcgcttccggcgacctcgcgccgctggcgcatatgtcgctaaccctgctcggagaaggtaaagcgcgggtacgcggcggcgactggctgccggccaccgaagcgctgcgtcaggtggggctggagccgattaccctggcggcgaaagaggggctggcgctactcaacggcacccaggcctcgaccgcttttgccctgcgcggtctgttcgaagccgaggatctgttcgcctccgcggtcgtctgcggggcgttaaccaccgaagcggcgctgggctcacgtcgtccgtttgatgcgcgcatccatgaagtgcgcggccagcgcgggcagattgatgcggcggcgttgtatcgccacctgctgaccgacgatagcgcgatctcgcagtcgcaccataactgcagcaaggtgcaggacccgtactccctgcgctgccagccgcaggtgatgggcgcctgcctgacgcagatccgccaggcggctgaggtgctactggctgaagccaacgcggtctccgataacccgctggtctttgccgccgaaaatgacgtcatctccggcggtaacttccatgccgaaccggtggcgatggccgcggataatattgcgctggcgatcgccgaaatcggctcgctctccgagcgccgcatcgcgctgatgatggatagccatatgtcgcagctgccgccgttcctcgtcaaaaatggcggcgtcaactccgggtttatgattgcccaggtcacggcggcggccttagccagtgaaaacaaagcgctgtcgcacccgcatagcgttgacagcctgcccacctccgcgaaccaggaagaccacgtctcgatggcgccggcggccggtcgccgcctgtgggcgatggccgagaacacccgcggggtgctggccgttgagtggctggcggcggcgcaggggctggatatgcgcgaaggactgaccaccagtccgctgctggaagaggcgcgtcacttgctgcgcgaacgcgtgccgcactatacgcaggatcgctacttcgccccagatatcgataacgccattgcgcttctggcggcccgtcacctgacgcgtctgctgcctgccgtactgcattaatcaccgttgttctctgtacccgcgtcgggggaagtcattcccccgaccgccctacaccgcatatttgtcgtcatataaaaaaatcaggacacctgtatatgcaacaacaacacaagccacatctgctgcgcgggctcaatgcccgacacattcggtttattgcgctcggctccgctatcggcaccgggctgttctatggctcggcctcagccatcaaagcggcgggcccggcggtgctgctggcctatctgattggcggcgcggcggtgtttatcgtcatgcgcgcgctgggcgagatggcggtgcgcaacccggtttccggctccttcggcagctatgcccgccagtatctcgggccgctggccgggtttattaccggctggacctacacctttgaaatggtgatcgtcgccctggccgacgtcaccgccttcggtatctatatggggttgtggtaccccgatgtgccgcgctggatctggatcctcagcatcatcttctttatcggcgcgatgaatctgtgcaacgtgcgggtatttggcgagatggagttctggctgtctctggtgaaggtggtggcgattatcgccatgatgctggcgggggcggggatcatcttctttggctttggccacagcttcccggccaccgggctggaaaacctctggagccacggcggctttgcccctaacggctggcagggcgttatcgcctcgcttggcatcgtgatgttcgccttcggcggggtggagattatcggcgtcaccgccgcggaagcgaaggatcctaagaaggtgatcccgcaggccatcaataccattccgctgcgcattatcctgttctacgtctgcaccctggcggtactgatggcgatcttcccgtggaacagctttggcgaacaggggagtccgtttgtgcttattttcgacggtctggggatcccggcggcggcgaccatccttaacatcatcgtgatcagcgccagcatctcggcgattaacagcgatatttttggcgccggacgcatgatgtacggcatgtcgaaagaggggctggcgccgaaaagcttccagcgcatcgccagcaacggtgtgccctggatgacggtggtggtcatgggcggcgcgctgctggcggcggtggtattgaactatctgatccccgagcaggtatttgtgctaattgcttcgctggcggcattcgccacggtatgggtgtggctgatgattctgctatcccattttgccatgcgccgcggtttgtctgccgaagagcgcagccagatcgcctttcccattccgttctggccggttgcgccgctgttgacgctactgtttatggggctggtcatcgccgtactagggatgtttgccgaaacgcggatggcgctgatcgccggcctggtctggctcgggctgctgacggtggtgtggtatgcgcgggtgcgtaaaacggcgctgcaggtagccactgaacagtaagatcaatttccccggtggcgctgcgcttaccggggctacaaatggcacggaccgtaggccgggcaaggcgtcagccgccgcccggcataaaagcggctccgtgcccgcggcaatcgcccggcggcgctgcgcttgcgcgggcctgggggtattgtagatactgctatcggcttgtaacggttttaatccggtaaaaacagttgttttgtattaattccgagcacattgcgctcccgaaatgtcttctacgttatgttactcatggcgcagggagcgcacagggggcggccagtcgccgccgccccctgtacccccgggctctggccgccaaaatcgccacttcgtggtaccttcgacttatccctgcaggcttcgggtcgggccgaggcagcgtccttgcaaaacacggccctcagcccgcatccatgcgggctgccccggccttccgggaacgtctcagcgatgttgaggccgccagccccggcagtttcagtggccccatgtttggcggcgattcacatactgggtctggaccccgtaggccgggtaaggcgtcagccgccacccggcaaaataatcgcgcaatagcaccgtaggccgggcaaggcgtcagtagtgtaggtcgggtaagcgcagcgccacccgaaaaacaaatggcgccgcgggtaccccggacaaggcgcaagccgctatccggggaagattaactgaacagggcggtgatggaggcgctggcgagggaatggaaatggacgttaaagccgaccatcgcgccgctggcctcagcatccacctcaattttctcgacgtccagggcgtggacggtgaagatatagcggtgggtttcgcccttcggcggcgccgcgccgccgtagcctgccttaccaaaatcggtgcgggtctgaacggcctcttccggcagctccgcctgaccggaaccggccccttgcggcaggacgcgggtatcggccggcaggttagcgaccacccagtgccaccagccggagccggtcggcgcatccggatcgtagcaggtcaccacaaagcttttggttcccgcgggcacatcatcccacatcagatgcggcgaaatattgtcgccatcgtagcccatgccgttgaagacgtgacgattaggcagcttaccgccgtcctggagatcgtgactgatcagtttcatgcttcatcctcattgataatgcgctgattaacaaagaagtgtagccttcccgacgacgcaattccgctatttattcgctaaaaaatgtttcgtcctgcactgcctggttgaccgcacgggtcaggcgggtcagctgctcgggcgtgatgatgtacggcggcatcagataaatcagccggccaaacggacggatccagactccctgctcgacgaaaaagcgctgcagggcggccatgttgaccgggcgacgggtttcaaccacgccaatagcgcccagcacgcggacgtccgcgaccagcgcagatccccgcgccggggccagctcggcctgcagctgggcttcaatcgccgccacctgcggctgccattcgccgctctccagcaggcgcaggctttcgctggccaccgcgcaggccagcggattgcccataaaggtggggccgtgcataaagcaaccggcttcgccattgctaatggtttcagcaaccgttcgggtagtgatggcggcggaaagggtcatggtgccgccggtcagcgctttgcccagacacagaatgtcggcggtaatcccggcgtgttcacaagcgaacagcttgccggtgcggccaaagccggtggcaatctcatcggcgatcagcagtatcccttcccggtcgcacattttacgcacccgcttcagccactccggatggtacatccgcatgccgcccgccccctggacgataggttcgaggatcactgcggcgatttcatgacgatgcgcggccatcaggcgggcaaacggcaccatatctatctcgtcccactcgccgtcgaagcggctttgcggcgcgggggcgaaaagattatccggcaggtagccctgccacaggctgtgcatcgagttctgcggatcgcagaccgacatcgctccgaaggtatccccgtgatagccgttgcggaaggtcagaaaacgacgacgtggttcgcctttagcttgccagtactgcagcgccattttcatcgccacctctaccgccactgaaccggagtcggcgaggaaaacgcactccagcgaggccggggtcatcgccaccagctgacggcatagcgctactgccggcggatgggtgatcccgccgaacatcacgtgcgacatttggtcaatttgtcccttcagcgccgcattgaggcgtgggtgattgtagccgtggatcgccgcccaccaggaagacataccatcaaccaactgttcgccgccggcgagggacagctcgcaaccgtgggcggacaccaccgggtagaccggcaggggggaagtcatagaggtgtaggggtgccagatgtggcgccgatcgaaagcgagatcgtccagtgtcataagcgacttgtaaaccattttgaaaacatttaggtttacaagtctacactgaacttacttacaatgaaacgtacacaaaatatttcgcgcagcatcgaggcggcaagcgagaacatccccaggagcatagttcactatgtggctgggaggcgcgagtgccgccaacaaagaggctgtgtgaaataggaagtgtacgaccttttggagaggaaaatggctcaccaacctcgctggacaatgtcgcaagtaacggaattatttaataaaccgctgatcgatctgctattcgaagcgcagcaaatccatcgtcaacactttgatccgcgccaggtgcaggtcagcaccctgctgtcgatcaaaaccggcgcctgcccggaagattgtaaatattgcccgcagagcgcacgctacaaaaccggcctcgaagccgagcgcctgatggaggttgagcaggtgctggaatcagcgcgccaggcgaaaaacgccggctccacccgcttctgcatgggcgcggcgtggaaaaaccccaatgaccgcgatatgccttacctggagcagatggtgaaaggggtgaaggcgctggggctggagtcctgtatgacgctcggcaccctgaccgacagtcaggcgcagcgcctggccgaagcgggcctcgattactacaaccacaaccttgatacctcgccggaattttacggcaacatcatcaccactcgcacctaccaggagcgcctggatacgctggacaaagtgcgtgatgctgggatcaaagtctgctccggcggcatcgtcgggctgggagagagcgtaaaagatcgcgccggactgctgctgcaactggctaatctgccgacgccgccggagagcgtaccgatcaacatgttggtgaaggtcaagggcacgccgctggcggataacgacgacgtcgacgctttcgatttcatccgcactatcgccatcgcgcgcatcatgatgcccacctcctacgtgcgtctctccgccggccgcgagcagatgaacgagcagacccaggcgatgtgctttatggccggggcgaactcgattttctacggctgcaagctgctgaccacgccgaacccggaagaggacaaagacctgcagctgttccgcaagctggggatcaacccgcagcagacggcggtgctggaaggcgacaatgagcagcagcagcgtctggagcaggccttacttaccccggacactgaggaatattacaacgcggcggcgctatgagctggcagcagcgaatcgatcgggcgctggacgagcggcgggcggcggaagcttttcgccgccgcctgccggtgacgcacggcgccgggcgctggctggagcgggaaggggagcgctggcttaacttctccagcaatgactatctgggcctgagtcagcatccggcgattatcgccgcctggcaacagggggccacgcgctatggcgtcggcgccggcggctcgggccacgtgagcggctatagcgaagcccaccgcgcgctggaagaggcgctcgccgactggctgggctatccgcgcgcattgctgtttatctccggctttgccgcgaatcaggcgctgatcgccgcgctggcggaaaaagacgatcgcattgtggccgatcgcctgagccatgcctccctgctggaggcggcaagcctcagcccggcgcagctgcggcgctttacccacaacgatccgcagcagctcgcgcaactgctggctaagccgctggcgggcgaacagttggcggtcactgaaggcattttcagcatggacggcgacagcgcgccgctggcggccattcacgccgcgacgcaggccgcaggggcagtgttgctggtggatgacgcccacggtgttggcgtgatcggcgacgaaggacgcgggagctgcgccgcgcaggcggtgcgccctgagctgctggtggttaccttcggcaaggccttcggcgtcagcggcgcggcggtgctgtgcgacgaagcaatggccgattatctgctgcagtttgcccgtcatctgatctacagcaccgcgatgccgcccgcccaggcggtggcgctgagcgctgccctgcggatcattcgcagcgatgaagggcagcagcgtcgcgacatcctggccgcccgcatccgtcagttccgtgaggggatgggcgaggtgtcgctggggttgaccgactccgtcagcgcgattcagccgctgatcgtcggcgacaacgcccgggcgctgaacctggcctgccgtctacgcgacgcgggctgctgggcaacggcgatccgtccaccgacggtgccggtcggcagcgcgcgtttgcgcctgaccctgacagccgcccatcatactgaagacattaaccgtttactggaggtgctgcatggccacagtgaataagcaggcggtggccgcggcgtttggccgggcggccagcggctatacgcaacatgatgaactgcagcggcgctgcgccgatctactgctgcgccagctggcgcgccgcgattttgcgcaggtgctggatgccggctgcggccccggcagtatgagtcgctattggcgtgaggcgggcagcgtggtgaccgcgctggatctctccgccgggatgctcgcccaggcgcagcgtaacgacgccgcgcagcattatctgctgggggatattgaggcgctgccgctgccggacgcctgcgtcgatctggcgtggagcaatctggcggtgcagtggtgcgacgatctacgggcggcaattggcgagctgtaccgggtggcgcgtcccggcggcagagtggcgtttagcacgctgctcgccgactcgctgccggagctcaatcaggcgtggcaggccatcgacgaccggccgcatgccaaccgtttccttagcgaagcggcggtgcgcgcggcgcttagcggcctgcgcgcgaccggcgaggttcatcagattagcctgccgttcgccgatgcgctgagcgctatgcgctcgctgaagggcatcggcgccacccatttgcaccaggggcggaccgccgccccgcttggccgcggcaaactgcgcgagctgcagctggcctggccgcagcggcagggcatctgcccgctgacgtattctctttttacaggagtcattgagcgtgactaaacgtttttttgtcaccgggaccgatactgaagtcggtaaaaccatcgccagcagcgccctgctgcaggcggcgaatctgctgggttttcacactgccggctataagccggtggcctccggtagcgagcttaccggcgatgggctgcgtaatgaagatgcgctggcgctgcagcgtcatagtcgggtcgcattgcgttacgaccaggtgaacccctataccttcgccgagccgacctccccgcacatcatcagcgccgacgaagggcggccgatcgccgcggccaggctctccagcgggctgcgtgagctggaaggtctcgccgactgggtgttggtggaaggcgccggcggctggtttacgccgctctcggattccctgaccttcgccgactgggcgcaggcggaacagctgccggtcattctggtggtgggcgttaagctcggctgtatcaaccacgcaatgcttaccgctcaggcggtacgccaggcgggactaccgctggcggggtggatcgccaatgacgtacagccgcctggcaagcgccacgccgaatatctggcgacgctgaaaaaccgactggccgcgccgttcctcggcgaaataccgtggcttgccgatatcgcgcagcgcgacgatctcggccagtatctggacctcagggcgctggatccggcgttatccactgcgccagcagcggctcatccagcgccataatatcgccttcggcgacgttacggccccggtgcaagacacagaagcgatccgccacccggcggataaagggcaggtgctgctcggcgagcagcaccgtcaggccgatatcgcgatttaaccgcaacagcagatccgccagcttttgcaggcagcgcggccctctgccgcgcgagggttcatcaaggatcagcagccgcggctggacgatcagcgctctggccagcgccagctggtactgatcgtcgtcgctcagcgaggcgcctttgcgctgccgtagggcatagagctcgggaaaatgctcataaatctcgccgccgctggcgttagccccgggtttcccggccgccagggcgatgtgcaggttctcttccacgctgagttgggaaaaaatgcgtttatcttgtggcacgtagccgataccaatggcgctgcgcgattgagcggacaggggggtgagatcctgcggcggggcgccaatgtcatgccaggtcatccggccgctggccaccggcaggtggccagcaatgccagttaaccagggtggtttttcccatgccctcgcgtcccagtacgccaatgcactctcccgggcgtagtacaagatcgacattccacagcgaatgctggttgccgtaaaagtgatttactgcctgtaaattcaacatggacgttttctccttatcctggcgtcagggcgacagaaagatgctgcaaaactcttgccaggaaaaagaacgctcggaaaaaagcgctaaacgccgataccatcgggcctcgtcagcgccggggctgcacttttccggtgcccgacgctaaagggtggtgcaaaaagcagcaaaaatcgagcggctttaagcggatagttatcaaaaatagttcgataaaaatttttcgccacgcggttgaccgcaaaaggcgacaggcgccgggcggcggtggtcttgggctgcggacagttatccactattcctgtggataaccttgtgtattagagttagaaaacctgcggtaagctagagcgtacgcggcttgcggctgaattggcgcgaaaggcgtcttttctttaaagatcttaaatatcagcttgttagataaaatcaatgggtgtaagaaaagcgtcatctgctgccataaaagtttcatccgtccgcttgacaaatgttaaaaggtaaaattttctggggataaccctggcggccggaggattattccgtctgacgcgcgttttgcacccagcttgccggccaataagacccttttgtggcgttatcataagtacgcactgtttaaatatccagtataatttattggcaaaaaacggcccggggggtagaattaaacaccggccgctaattcttttttcaggttctgattgatgagtaaatcgtttgtactgcattccgcctttcgcccctccggagaccaaccggaagccatccgccgcctggaagaggggctggaggatgggcttgcgcatcagacgctactgggggttaccggctccggtaaaacctttaccatcgccaacgtgattgccgacctgcagcggccgacgatggtgctggcgccaaacaaaaccctggcggctcagctctacggcgagatgaaagagtttttcccggagaatgccgtcgagtatttcgtctcctactacgattactatcagccggaagcctacgttcccagctcagataccttcattgagaaggacgcctcggttaacgaacatattgagcagatgcgtctgtcggccaccaaagcgctgctcgagcggcgcgacgtagtggtggtggcgtcagtctcggcgatctacggcctcggcgacccggacctgtatctgaaaatgatgttgcatctgacggtcggtatgctgattgaccagcgagcgatcctgcgtcgtctggccgaactgcagtatacccgcaacgatcaggccttccagcgcggcacttttcgcgtgcgcggcgaggtgatcgacgtcttcccggcggaatccgacgatatcgccctgcgcattgagctgtttgacgaagaggtcgagcgtctgtcgctgttcgacccgctcaccggccacgtcgaagggacggtgccgcgctataccatttatcccaagacccactatgtgacgccgcgggagcgcatcgtccaggcgatggaagagatcaagctggagctggcggagcggcgcaaggtgctgctggccaacaacaagctgctggaagagcagcgcttaacccagcgtacccagtttgacctcgaaatgatgaacgagctgggttactgctcgggcattgaaaactactcgcgctttctctccgggcgcgggcccggcgagccgccgccgaccctgttcgactatctgccggcggatggcctgttggtgattgacgaatcccacgtcacggtgccgcagatcggcggtatgtaccggggcgaccgggcgcgcaaagagacgctggtggaatatggtttccgcctgccgtcggcgctggataaccggccgatgaagtttgaagaattcgaagcgctggcgccgcaaaccatctatgtgtcggcgaccccgggcgcctatgagctggataaatccggcggcgaggttgtggatcaggtggtgcggccgaccggtctgcttgacccaatcatcgaagtgcgcccggtggcgactcaggtcgacgatctgctgtcagagatccgcctgcgaacggccatcaacgagcgcgtgctggtcaccactctcaccaagcggatggcggaggacttaaccgagtaccttgaggagcacggcgagcgcgtgcgctatctgcactcggatatcgacaccgtcgagcgcatggagatcatccgcgacctgcgtcttggcgagtttgacgtgctggtggggatcaacctgctgcgtgaggggctggatatgcctgaggtgtcgttggtggcgatcctggatgcggataaagagggcttcctgcgttctgaacgctcgctgatccagaccatcggccgcgcggcgcgcaacgtcaacggcaaggccatcctctacggcgataagatcaccccctccatggccaaagccattggcgagaccgagcgtcgacgggagaaacagcagcgctacaacgaagagcacggcattgtgccgcaggggctcaataagaaagtggtggatatcctgcagctgggccagggcctggcgaaaaccaaagccaaagggcgcggtaaagcgaaggccgttgagcctgccgggcttagcgctgtggatatgacgccaaaagcgctgcagcagaaaatccacgagctggaagggcagatgatgcagcacgcgcagaacctcgagtttgaggaggcggcgcaaatacgcgaccagctgcatcagctgcgcgagctgtttatcgccgcctcctgattctgggcgcagactggcggagtggacgtgcggggtatagtgaaggtgcgcttctcttatcgtcctgcttgccagataacaaacatttgagaagaaaaaaggccgcgttgcggccttcttaatgtttgcttaatctcgccaggcgacactatcttcaacctgatgaggatagcgcccatgcaaaaaattaacttccgtgaatatctggcggtcgccaccgccctggtcattattgttgccttcttccatcaatgggtgctgacgttctgacccccgcgctgcgggaatagcacccacgcgcggacccctggccctggctgtcggttatgcaaaaaaaactgggcgtcatgcagctgagcgatgcgcgtgacgatgctcagtccgaggccaatgccgccgtagcgactgtccatgcgcacgaaggctttactgagttcgccgcttttcgcctcatcgatccccggcccttcatcttccaccgccatcaccggcatcaggcctgctttcaccgacacgcggatcgtcgacccttcagggctgtagcggtgagcattctccaccagattgcgcaggatcacgcggattaacgtcgcatcgccagagacgacggtctcgttttcgatatccgtcagcagcagccgctgctgacgctgcgccagcatagcctccagttcgtcctgcaggggttttaccacgtcatccagcaacagcacctgctggtagctgccggcggagaaggactggccgacgcgcgccagctgcagcagctgggaaatgctggtggtcatctgatcgagacgctggatcagcgggtcgacgcccatgccatgcactttcgccagcagctcaaggtgcagccgcagcccggccagcggggtgcgtagctcatgcgccacgtcggcggtaaacagccgctcgcggtcgagggtcagattgaggcgggaaaccaactgattcagggcggtggtcaccgccgtgacttcgggcaccgattcgctgagtacgataggagtgaggttgtccggcgtgcggttctccagttcgctttgcagtcgtgaaagcgggcgggtgatcttgcgcaccgccagcatgctgatatacagcgccaggccaacgatcagcaggctcggcaccagcaggctggcaaccgcttcccgtacctcatgctccacatgtttctggttgttgtgcccttcgatggcgctggccaccagcagctggatctgctctttgctctcatgccatagccagaagacgcttatcagctggcagaccaccaggatggcgccgatggtcagcagcagccggtggcgcatggtccaggtttcagttgcaaacagagccatggtctattccgtgtcgatgttgttagccagcatatagccaaagccccggacggtgcggatccgcgatttgccaatcttttcgcgtaggttgtgaatatgcacttccagggtattggtcgccggctcgttgtcccagctgtaaatgtcgttgtagaggatctcgcgatgcaccgggctaccggctttcatcatcagccgcgacagcagggcatactctttcggcgtaagatccagcgccgtttcacccagccacaccaggcggcgagtgacgttaaggcgcagattgccgacgctgatttcattatcgccctggttgttatgccggcggagcagggcgcgaatgcgcgcattgagttcctccagggcaaagggttttaccaggtagtcatccgccccggtatcgagaccgctaatgcgatcctcaagcgtatcgcgggcggtgaggatcagcaccggctgggtcattttctcccgccgcatgcgggagagaaaatgcagcccgtcttcatccggcaggccgagatccagcacgatcaggctgtaatgattgctggccagcgatagcgcggcttcgtgcgcggtggagacgccgtcgcacacgtatccttcactttgcatcgccagaattaacccctgcaacagcagcgcatcgtcttcaatgactaagattttcatcaaccagcctctctacatggcgttaagatatcatctgccgcctggtactcgcgggtgctgacgccgagcaggccgagcagggtggagaacagattatcctgcgagtaattctctttttgcgcccgctgctgcagacagtgcgcggaaatgccgtagcgctgctggtagtcggcggagagccacagcgccatcggcacatgtttctgcgtatccggcgcgatggaatacggcagaccatgcaaatagacgccatcttctcccagcgattcgccgtggtcggacaaataaaccagactagtggtaaatttatcctgtttagattgcagtagttttatcgctttatcaacgacatagtcgacataaaggatggtgttgtcataggtattggtcaactgctcccgggtacagccctggatctcattggtgtcgcaggtcggcgtgaatttgcgaaacgccgctggatagcgattgtagtacgtcggaccgtggctgccgatggtatgcagcacaataatgccatcctgttgcaggttatcgatatagctgtcgagattatggaacaggacgtcatcgtagcactcgccatcgatgcactgcccggtgagcttcaggtcggtgacgttctggtgtggtacccggtcgcaggcgcctttgcagccgccgtcgttatcgttccacagtacctggatccctgcgcgctgtagaatatccaggacgccttcctgatggtgcgccagctcttcgtcataatgcgcgcgcggcatattggagaacatgcacggcacggaaactgcggttgccgtgccgcaggaagtggtatgcggaaaatagatcacgccgtcctgccgcatcagcgggttggtgtcgcgcgaatagccgcccagtgagaagttatccgctcgcgaagtctcgccgagcacgacgatcgtcaggttcttacggggagcgttatgcatcaccgctttctgcgtggcatcttcgccaatcttcaccagcggcaggttgtccatccgatgatgagcataccaggagttcacggccacaatgctgttggaagggctcagggatttcaccagctctttgttgttacggaacaccgaggcgtaatctttgtagaacagcgcggccaccagaataatcagcagcgccgaaacggcgatattgagcaggcgcatcgccgcgccgcgccaccgcgtggcgggcttacggattttcacccaccaggcgatgaataccgccaaaaccccggaaaggccgaggacggcaatcatttcgccggagagtagagcaaagctttccgccggagtggtgtcgaggatattggtgatcatgctgcggtcgatcaccacgccaaagttccagatgaagtattgcgccgaggcgctgagcagaatgaacaggctaatcaccagccggtccagcttcaggaacgaggcgagagtggtgaggatattcatcacgctaatggccacgatcggcatactgaggaataccagccagttatgcaggctatttaccggcagtaacgggaaaacctggcgataaaaagccaggttgagacagataccgatatagcaagcaaagagaatcagataagtcgtgcggctgaccaccggccgacgcagaggcaataacgacataatgcacacccacagaaaaagatgagggtatagtgccagccctattttaagacaaccttaagattttaaggtgcgccgaagagggccgtctccggcgcgcaggatcagcccggcagctggatcgctttctccagcgccccgcggagcagcgcccggtcatgacgataaggaacgtcgctggcctccagcggcgtctggatcaccaaccggtcgtcgatgccgctgatatcggcttttggaccggcgatcaccgcatccaccacccgcttgcctacatagcgctccataatcgcgatgcgctccgccagcgacagcctcgcggccgggctatgctctttgccgaggttatcgataaaaaccatcggcgccggggtgcggcgcaacgcctgggccatctcgtcgagcaacaggatcggcagcaggctggtgtaaaaactgcccggcccaatgaggatcaaatcggcttcggcgatagcctccaccgcctcgcgggtggccggtaccggcggggtgagcatcagctcctgcggcacattatcaagctgatcaatattcacttcgccataaacttcatggccttcatgatcgagcgccatcaaatccaccggttgttctgacatcgggatcaggaaagcgtccactttcagcaggtttctgatcaaattgatcgcctctaacggccgcacgctcaggtgatccagcgcctttaacatcaaatttccgaggttatgtccggaaagctcgccgttaccgccaaaacgatactcaaacatcgccgatgctacgctcggctcggcaattaactggttgatgcaattgcgcatatcgccccaggcaatgccaccttccgaacgacggatccgcccggtggaacccccgttatcggtggtggtgacaatgccggtcagccgtgaaccgagcgaggagagggaggacatcacccggcccaaaccatgcccgccgccgagcgcgaccacccgatcgaggtcagcgaatgtacgattgcgcatagaaattccttatttcacataaacggccacacactacccgatctacccctaaaagacgatgggaggagcccgacaaactgaccgacatcaaggcaaaaaaatgatttatggctattctgtagcgaaaatgtacgaagatagcgatatatataagattatatagcgaaatcgccaatggcgaaactgcctgtaacgcgctactatcgacataacctgttaacactctagcctcttcgcctgtgtcaaaagatatggcgatttggccgcgacgccgccggttgtcgccagggcgtggaaagaaatgaccgcgtctcccgtatttggaaaggtgtatatggcctcacagcttaccgatgcattcgcgcgtaagttttattacctgcgtctgtcgattaccgatgtgtgcaacttccgttgcacctactgcctgccgaacggttacaagcccggcgccgtcaataacaatggctttctcagcgtagacgaagtacgccgggttacgcgcgctttctccgcgctgggcaccgaaaaagttcgcctcaccggtggggaaccctccctgcgccgcgacttcaccgagattattgccgccgtgcgtgaaaacccagcgatccgtcagattgcggtcactaccaacggttaccgcctggcgcgcgatgtcgaacgctggcgcgatgccggcctgacggcgattaacgtcagcgttgatagcctcgacgcccgccagttccatgccatcaccggccaggataagttccaccaggtgatggacggcattgacgccgccttcgccgccggctttgacaaggtaaaggtgaataccgtgctgatgcgtgatgttaaccatcaccagctcgataccttcctcgcctggatccaaccccgtcgtatccagctgcgctttattgagctgatggaaaccggtgaaggcagcgacctgttccgccgtcaccatctctccggcatggtgctgcgcgatgaactgctgcgccgcggctggatccatcagatccgccagcgcagcgatggcccggcgcaggtcttttgtcacccggactacgccggcgagatcggcctcatcatgccgtatgaaaaagacttctgcgccacctgcaatcggctgcgcgtctcgtccgttggcaaactgcacctgtgcctgtttggcgaaggcggcgtcgacctgcgcgacctgatggccgaagaccggcagcaggccgcgcttgaggcgcggatcgccgaagccttaacccataaaaagcagacccatttcctgcatcagggcaacaccggtattacgcagaacctgtcctatattggcggttaatcgttttcgaaaggagcattcagatgagccaggctagcgctgagtttatcccgacccgtattgctattcttaccgtttccagccgtcgcggcgaagaggacgacacttccggtcactggctgcgcgaggcggcgcaggaggcggggcaccaagtcgtcgagaaggcgattgtcaaagagaatcgctacgccatccgcgctcaggtatcggcgtggatagccagcgataacgtgcaggtggtgctgatcaccggcggcaccggttttaccgacggcgatcaggcgccggaagcgctgctgccgctgtttgatcgtgaggtcgaaggctttggcgaagtgttccgcatgctgtccttcgaagagatcggcacctcgacgctgcagtcccgggccgtggccggcgtcgccaatcgtacgctgattttcgccatgccgggctcgaccaaagcctgccgcacggcgtgggacaacatcatcgccccgcagcttgatgcccgcacccgtccgtgtaacttcattcctcacctgaagaaataatctatgtcacaactgacccatattaacgccgcgggcgaagcccatatggtggatgtctccggcaaagcggaaacggtgcgcgaagcgcgcgccgaggcttatgtcgaaatgcaggcgacgaccctggcgatgattatcgacggcagccaccataaaggcgacgtgtttgccaccgcgcgtatcgccgggatccaggcggccaaacgcacctgggagctgatcccgctgtgtcatccgctgatgctcagcaaagtggaagtcaatctgcaggcgcagccggaacataaccgggtgcgcattgaatcgctctgccgactcaccgggaaaaccggcgttgagatggaagcattgaccgccgcctcggttgccgcgctgaccatttacgatatgtgcaaagcggtgcagaaggatatggtgattggcccggtgcgcctgctggcgaaaagcggcggcaagtccggtgattttaaggtgggtgaatgccatgattaaggttctgttttttgcccaggtgcgcgagctggtcggtaccgattcgctgacccttgatgccagcgaactggcgactgtcgaagcggttcgtcagcagcttgccgcccgcggcgatcgctgggcgctggccctggaggagggcaagctgctggcggcggttaaccagacgctaacctctttcgaacatccagtggccagcggcgacgaagtggcgttcttcccaccggtaacggggggctgacatgacgcaaacccgtatcgtggtcagcccggcgcgctttagcgtcagtgaggaatatccctggctggcggaacgcgatgaagacggcgcggtggtcaccttcaccggtaaagtgcgtaaccacaacctcggcgacagcgtgaaggcgctgaccctcgagcactatccggggatgactgaaaaatcgctggcggaaattgtcgagctggcgcgcgagcgctggccgctgggccgggtgacggttatccatcgcatcggcgaaatgtggccgggggaagagattgtgtttgtcggcgtcaccagcgctcaccgcggcagcgccttcgccgccggcgagtttattatggattacctgaaaacccgcgcgccgttctggaagcgtgaagcgacgccggatggcgaacgctgggtcgacgcccgcgacagcgatcgccaggcggcagagcgctggtagtgtgatacgcttacagggtgaaactttgtttatcaggagagagtcatggacagatatccgcgttccgattcaatagtgcagggccgtaccggcctgcagacttacatggcgcaggtgtacggctggatgacggtcggcctgctgctgacggcgtttatcgcgtggtttgcagcgaatactccggcggtgatgatgttcgtcttttcgagcaaaatcactttcttcgggctgattattgcccagctggcgctggtgtttgtgctgtcgggaatggtgcagcggctgagcgccgggatggccaccacgctgtttatgctctattcggcgctgaccggactgacgctatcgagcatttttatcgcctatacctattcatcgatcgccagcacctttgtggtcaccggcgggatgtttggggcgatgagcctgtatggttacaccacgaagcgcgatctgagcggcttcggcagcatgctgtttatggggctgattggcatcgtgctggcgtcgctggtcaacctgtggctgaagagcgaggcgctgatgtgggctgtgacctacattggagtggtgctgtttgtcggcctgacggcgtatgacacccagaagctgaaaaacatcggcgagcagattgatacccgcgacagcgccacgctgcgtaaatactcgatccttggcgccttaacgctgtatctggacttcatcaacctgttcctgatgctgctgcgtattatgggcaaccgccgctaacctctttatatcaaggggttgcatctccgaacgcccggcaagcgcagcgccgccgggcgagatttcaggctcggtacccttgattttgccgggcggcggcttgcgccttgtccggtctacaagatcttctcacaggctcacaccccgcaagcccggcaagcgcagcgcgaccaggccgtttcattcgcgggccagcttgcgctggttcttttgccgcagctttttcgcccggctctccagcagcagataggccaccgtcgccagcagcaatggcaggaaataatagagcgcgcgccaggcgagcagggcggcaatgatcgcgcccttcgaaatatcttccccggagagcatggcaataaacaccgcctccagcacgccgatcccagccggaatatggataatcaccccggcgatactgctcaccagcagcacccctaataccagaaaatagttaatctcgctgcccaacagcagccagattatcgcccccatcgccatccagttcgccgccgagagtcccatctgcagcagcgcgaagcgccaggagggcagcaccagccgctggcctttaatcgtcaggtgacggcgtttagcgaacgcgcagccgaacagatagcaaagcgtaaggatcagcatcaccccgccgataatgcgcagagtggtctggctgatgtaccagtgcggcggcagcttcaccagatctgccgtgaatatcaccccgcccagcagaatatagcccaaccagttggtggtaatgcttaaggaaaaaatacgggtgatggtgctgccgttcagccccagccgcgagtacagccggtagcgcataccgatcccgccgacccaggtgctgagggtcaggttgaaggcgtagcagataaacgacaccagcatgacctggcgtttcgccagcttgtgcccgcaataggcccgaccgagcagatcgtagcagccgtaaatgaggtagctgacgataaccagcgcaatggcgctaaacaaggccagccgatcgtagccgcggatcaccttccacacgtcctgccagtcgactttttgcgcgtagatcaccaacaggacgatgacggcgataaaaaagagcacggtcagcactcttttcgccatccgccagcggggatgtgatttgctcatagtggattatccctggctggagactcgacgcggtcctgagtttcaatttccggctggaccggcgggctgactctggccagccgcggggtatgagccggtaaccagccgacccatgccgggaagtggcgcagaaagtggaaagccatcacgctgacgcccagccgccaccagttgcgtttcggcagcatcgttttatcgatccgctggcaatcccgggcgataagcccgttgagattatcgcgcagcgtctggttaaacacccgatcgtggatgatcagattggcttccagattcagcgacaggctgagcggatccaggttgcttgacccaacggtggcccagtggtcgtctgccagagcgaccttgccatgcagcgggcgacggcgatattcgtaaatctgcaccccgcccttaacgagatagtgatagagcaggtgggcgccaaacttcacaatgggaatatccggttcgccctgcacgatcagcttaacccgtactccgcgccgcgcggcattgcgcatcgcatgcagcaggcggtagccggggaaaaaataggcgttagcgataatcacttcccggcgggcgctggtcagcatcttcagatagtggcgttcaatatcgtcgcggtgatcctggttgtcgcgccagacgaacagcgcctgcgcctcgccgggggtctggttaatctccggctggtggcgacgacgtcgccaccagcggcgggcggtttcgctgttgggcaggttttccagctcgaactgcaggatgtcgagcaccaccggcccttcgacctgcaccgcataatcctgcttcgcctccggaccgtagtcgctcatatgttcggcggagtagttaataccgccgacaaaggcggtggtgtcgtcgattaccacgattttacggtgcatgcgacggaacagattggtgcgcatccccatcagcttaggacgcggatcgtagtagcggaaaatcacgccagcggcggtgagctcgccgacaaattcatcgctgagatccggggaaccatagccgtcgaggagcacctccacctggatgccacggcgggcagcctcgagcaggaccgcgtgcagccgccggcctacctcatcttcaaaccagataaaggattcgaggatcacccgccggctggcgcgaccgatggccgcaaacagcgccggatagtactggtcgccattctccagtagcgtaatgcggttgccttcctgccaacgacatttcacaaatgtatctccacgctaaggggtgcatgatcggacagatgccgccattgtttaagggccagcgccttcgggcgactggcgtgggcgttcttgacgtaaatgcggtcgaggcgcagcagcggaaaactgaccggaaaggtgcgcgccggccgtccgcgggcgcgggtaaagatctcttccagaccggcctgggcttttaacggctggttagcctgctgacgccagtcgttaaaatcgccagccaccaccaccggctcgcccgcgggcagggtattgacccactccgccagcatggtcaactgcgcctgccgttggtcggcgcgtagaccgagatggacgcaaatcacgtgaatagttatcccgctccgcggcggcacgatgcggcagtacagcaggccgcgcttctccccgttgccgaccgagatatcgcgattttcgtagtattcaatgggaaagcgcgacagcacggcgttgccgtggtggccttccggataaaccgcattgcgcccgtaggcgtagtcgctccacatggtgtcggcgagaaattcataatgggtcgtatccggccagttttcgatgtgcagcggatgtacctcatgagcgcccatcacctcctgcaggcaaacaatatccgcgctaacgctgcgcacggcgtcgcgcagttcgggcaaaataaaacgccgattaaacgccgtaaagcctttatgggtgttaattgtcagcacgttcaacgaaaatcccgccgttggctcagccataattctccagtaaatgtcactttcctgaataaaatagtgtagtagacgtcacaaaaagatgcggtgttacggaattttccgtaaagtgcggtactctgagtagcagagaaaaatccttcaggagagaagccatgaagtggcaacaacgtgtacgcgtcgcaacgggtcttagttgctggcagattatgttgcatctactggtcgtggcagtactggtgatgggttggatgagcggcgcgctggtgcgcgtcggattgggactgtgcgtcctctacagcgtcacgctgctggcgatgctgtttttacagcgtcaccatgaggcgcgctggcgcgatgtgggagacttccttgaggagctcaccacgacctggtacttcggcgcggccatgatagcgctgtggctgctgtcgcgcgtgctgcacaacaacctgctgctggccctcgccgggctggtgatactggcaggcccggcggtggtctcgctgctggcgaaagataagagccgttatcctaaagcgttcgggctacaacaaggcggcaacgcagcgaatccccagaagcatagataactatgcgactggggtgagtaaggaaagccaacgccgttgtagtttgaacgatgacgggtattacgcaatcttccttcggaacatcgcatacgccgctgagccggtggtggccgctatgaccagtagcggccacaaacttccccacacaatctccagactcgcatccttcagataaatttgcttggtgatatcggtaaagtggcggatgggatttatccaggtcagatcctgcagccactgcggcatgttttccactggtgagacgtaccccgacaggagaatagccggcatcataaagacgaacacgccgataaacgcctgctgctgggtggcgcacagcgacgaaatcaataagccaaagcccaccagcgatagaccgtaaatcaccatggtgaaatagaacagcagcagcgagccggcaaacgggatctgataggcccagataccaatcgccagcacgatagttgcctgcagggtggcgacgatcagcgccggcaccgccttgccgacgaaaatttgccaggtggcgaggggggagaccagcagctggtcaagggtgccctgctcgcgctcgcgagccaccgacagcgaggtgacgatcatcaccccgatggtagtgatcatggcgataagcgacggcaccacgaaccatttatagtcgagattcgggttgtaccagttgcgcaccaccagctcgctgttgttcggcttcgctttaccctccagcagctcctgctgatagtttttcacaatctgttgcagatagttggcggcgatttgcgcgctgttggagttgcgtccgtcgagcagaagctgcagcggggcggtttgatagttatccagattgcgcgagaaatcggccgggaagcgcaccaccagcagagctttttgttcatcgatggtcggctggatcgcctgcgggctttgcagcagcaggacgtgggtaaaggctttggcgcgggcaaagcgctgagtgagttccaccgcgtggcgaccgctgtcctcgttgtagatagcgatggtggcgttggtcacctccagcgtcgcggcaaagggaaacagcagcacctgaatcagcaccggcatgattaaaatcgcccgcgtctgcggctcgcgcagcagcgactgcagctctttgcggattaatgtccataaacggtgaaacataatagctcctttggcccattcaaccacgccgggcggcactgcgtttgcccggcctacgggatcggcgaaccgtataatcgatgttggttaaaccgtaggcccggtcggcgcagcgccaccggacaaaacctaatccagacgccgtttggttttcagccacgtcagaccgataaacatcaccgccgacgcaatcaaaaacagcacgttgaccagcagcaccaccggaatattgcccgccagaaacaggctttgcagagtactaacgaaatagcgcgccgggatcacataggtcaccgcgcggatcaccgccggcatactgtctatctggaaaataaacccggacagcataatcgacggtaaaaaggcggcgttcagcgccacctgcgcggcgttaaactggttgcgggtaatggttgagatcagcagccccatccccagggtgctgagcaaaaacagactggtaatgacaaacaggatcggcagcgagccgcgatagggcacgccgagaataaataccgacaccagcatacacagcagcatcgccagcatgccgaggaaatagtagggaatgagcttgcacagcagcagttcggcgcgggtgatctccgtcgacagcagcgcctccatggtgccgcgctcccattcgcgggccaccaccagcgaggtcagtatggcgccgaccacggtcatgatgatggtgatcgccccggggataataaagtgctggctaatagccgccgggttaaaccagtagcgcatctgcacgtcgatcagcggttcaaaggtttcgccgcggtcttccgcccgctgctgctgccagatttgccaaataccttccacatagccctgagcgaagttagcggtattgggctcgctgccgtcggtgatgagctgcagcggtgcgtcggcgccggggcgggccatctggcggtcgaaatccaccggaatgaccaccatggcgcggatgcgcccggcctgcatcatctcaatcagctgcctgcggctgtcgctgacggtggcatcgatatagggcgagccggtcatggtatggacgaaatccagcgcctcttcgctctgctgctcaagcaatacgccgacccgcagcctgctggagtcgaggttaatgccgtagccgaagataaacagcagcagcagggggatcaccaccgcgatcagccaactgctgggatcgcgcacaatctgccgggtctctttaacgcacagggcgcggacccgccgccaggagagaatgctattgcccatggctattctccttgtcccagcggttaatcagggtaataaacgcctgctccatggttgggtccgtctggctgtcgtccgccgcctgggccttcagctcgtccggggtcccgctggcgataagtttgccgtgatagaccagcccgatgcggtcgcagtattccgcctcatccatgaagtgggtggtgaccattaccgtcacgcctttatcaaccatgctattaatatgtagccagaactcgcggcgggtaaggggatcgacgccggaggtgggttcatcgagaaacagaatatcgggttcatgcatcagggagcaggccagcgccagccgctgcttgtagccgagcggcagctcgtcggcggcgtggcgggcgatacttttcaggccaaaggcatcgctcatccgggcgattttttcattttgcgcccggccgcgcaggccatagacgccggagaaaaagcgcaggttttgttcgacgctgaggttgccgtacagggaaaatttttgcgccatatagcccagatgctggcgcgccttgccagagctgaccttgagatccattcccagcaccagcgctttgccggaggtgggcaccagcaggccgcacatcattttgaaggtggtggattttccggcgccgttggggccgagcaggccgaaaatttcaccgcgcttaacctggaaatcgacatggtcggtagcggcgaaatcaccaaactttttcgttaacgactgggcttcaatgaccgtttcctctttgctgccgtcaacgcgatggataatcgcccccaacggcgattcagcggtcccggcgccgccgagcaggtcgataaacgcatcttcaaagcgcggcgcggtgtcggccacctgcagcggcggcatgtcgccatgctgctggacgtcctcaatgcgcgcgtcctttttcaggatcagacgcaccgatttgccctggatcaccccgtcgctaacctgcggcagcttcagcgcccgctgcagcaggcggcggttgttttcctgcgggctggaaaccagaaagctgcgcccggccatggtttgcgtcagcgccgtcggctcaccctggtagagcagtttgccttcgttcatcagcagcacatcgcgacactgctcggcttcatcgagataggaggtgctccacaggatcagcatgccgtcgccggccagctcgtgcaccatctgccatagctcgcggcgcgagatagggtcgacgccgacgccgggctcatcgagcagcagtactttcggatcgcccaccagggtacaggcgaggcccagcttttgcttcatcccgccggaaagcttgcctgccagccgttcggtgaatggaccaagggaggtgaactccagcaggcggtcgaaaattttcttccgcgcctcgccggtgacgctgcgcaggtcggcgtacagggtcaggttttccatcaccgtcagatcttcatacaggccgaacttctgcggcatatagccgagcaccgcgtgcagggcgctgtcgtcttttagcgggtcgaagcctatcacgctggcgcgaccctcatcaggcttgagcaatccggcgagcattcgcatcagggtggttttccccgcgccgtcgggccccaccagcccggtgacgtagccggcgcggatcgtgcaggtgagcggcgctaccgctggcctgtccataccgggaaaacggcggctcaggccgtttaaggcgatgatggcctcactcatgtccgttcccgtggctaaaggagatggtcaccggcattccctggcgcagcgcgccgtcggcatcagtcaccacaatgcgcagacggtagaccagatcggtgcgcagatccggggtctcgacggtcttcggcgtgaattcagcgctcggcgagacaaaaccgattttgccgtgatagggcttatccggccggctgtcggtatagagcagcacttcttgtcccggctgcgcctggccgaggtttttctcgtcaacataggcgcggacccacaccggatgcgttaacgacagcgtcagtacggtaccgccggcgttgagcatagtgccgggctcgacggcgcgggtcatcagcgtaccgtcagaaggggcggtgagcacggtatcgtgcaggtccagtttggcctgggccagcgccgcctgcgcctgttccagactggctttggcctgggcaatctcctgcgggcggttaccggcgcgatactgacgcagcttatcctgcgccgatttgagcgttgcctgcgcctgatcgcgcgaggagcgggcattctccagatcgttggcggaaatggcgctgctggcgcgcagcccgagctggcgctgataaaagttttgcgcatagtcgtaagcggcctgcgcctgtttcaccgccgccgcggcctgggcaatctcttccgcgcggtagccggccatcatcaggtcatactgcgcctgggcggtggagacattggcctgggcctgcagcagggcattttcatacggcgcgcggtcaagctcgccgagagtttgcccggcgcggatgctgtcgccttcgtcgacggtcagcgaggccagcctaccgccaacgcggaagctcatgttgacggtgcggatatcgacattgccatacagggtcagcggctgctgccggctgctctggtaccaccaccagccgccgcccagcgcggcgagaagaatcacgatcagcagaatgacgacgacgggttttttcatcagcccaaactcctttgcgataacccatgcaggatgaaatcgatatgacaggtaatgacttcgaaaatctgttccgttttttgcgcgtcaaactgcgtccagccggtgcgcagcaggatagtttcacgcccgagacggaaagcgagcacctcgcccagcagggcgtgggtatggaggatcatttgcgtatcactggcttcgcagccggtccaggcggcaatcagccgggtgagataatggtgcaggggggcaatcacctgctggtggatcagatggtaggcggcggtcggcgccagctgctcacgggaaatgaatttgcttaagttaaccgtatcgtcctgggtgagcagcaggatcatgttgtggcaggcgctaaggatgaggtcgcggatcgcctggcgatccggcgcttccccggcaagcaggtgctccgccgcttcggcctgcgggcgaaaattgtcgccgataaaatcggcgatccactgggcgcaggcaagatacagatcgtctttcgagccaaaataataggtgatagcggcgatattctgcccggcctgggcggcgatatcgcgggtggtggcgtgctggccgtactcgccaaactgggcgatagcggccgcgataagctgattttttgcctgttcgcctttactggtcatcgcgctcggtaaaaattaatcaatcgattgattaactttaggcgccgactggcggtttgtccaccagccgggatcaaatatggaacccttcctctttcagctctccggcgacccaggcgaagaagcgctggaccttctccttctgttcattagcgtgggggaggacgaagtggtgcgcgccgaccggcatgctccgctcgtcggcaaataccggcgtcagctgtccctggcgcacgtgtccgccggccagcagattgctctcgaggatcacgcccatccccattctggccgcctcgatgctcatatatgaccggtcgaaattaaaaatgaagtttttatgccagccgcggaccttgtgccacgacagccagttgctccagttaattaaggtgctgtcggagtggatcagatcgcaggccagcagatcttccacagcctgcacaggatggctggctaaataagacgctgcgctgtagggcaggacgcgctcatttttaatggttctgaccagcagcgtcggccactgtgacagcccgtgacgaatatcgatatcaatattatcccgggagaactggatgctttcgtatgaacaggtcaggctgatttttaacgccggccacgcctggcggaatttatccagacggggcatcagccatagcaggccgaagctcggcgccgaatgaatgcgtaaataatcctgatggatatcgttgatcacctggctggtggcctggccaatcatattcagcgccccggagacctctttgagatatttttctcccaccgccgttaacgtgacgcctttgctgctgcgggagaacagttttttccccagaaagtgctccaggctagctatctgatggctgaccgccgaggcggtaatattgagattctctgcggccagattaaggctgccggtagcggcgacttcaataaaagcctggatattgcgtaaagagggcatcggcagatttttattgggtagcggttggctcatggcggcatcctgcgcggggcgcgaataaaagaaaatagcgaacagcgtggcgcagccgggatgtacagcatagggaaaagcgaaaaaacaacgttaatttgtgatgggcttaacaatttatcttgttaaaagcgcgcaggtcagtaaacgctaaaaatttgcgggaagtcactaactcaatttttctcaatcataattgaggttttttgaataccgtttcattttggggttgttatattcctctcacaggcctgataacaaactgcgatgtgcttgcatcgcaattataaaacacctaaccacctgtttcgctggcgaaaagcatttatctcttgctcctgtatggatagtaaaacgcggtgatccgaagcggcagcttacagcgaagtggatgaggtataaaacgaggaaaccctatgtcacgtatagatacgctggtctgtactgacgccaggaaaacgaaatatcgtttcgtggttttgacgatgatttttctggtgtatgccatcaattacgccgaccgaacgaatattggcgcggtactgcctttcatcattgatgagtttcatatcaataattttgaagccggggccatcgccagtatgtttttcctcggctatgcggtaagccagatcccggccggctttttcatcgccaaacgcggtacccgggggctggtatcgctctccattttcggcttctccgcctttacctggctgatgggcacggtgagctccgtgtttggcctgaagctggtgcggctgggactggggctgagcgaagggccttgcccggtggggctggcttccaccataaataactggtttccaccaaaggagaaagccacggcaaccggcgtttacatcgcggcgaccatgtttgcgccgattattgtgccgccgctggcggtgtggattgcggtgacctggggctggcggtgggtctttttctccttcgcgatacccggaattgtggcggccatcgcgtggtatctgctggtcaaatccaagcctgctgagagcggatttgtttcccaaagcgaactggcagagattaatgccgggcgtgaaagtcataataatagcgtacgcgaaaatatcttaattgccgaaagattcacctggctggataaaatcattcgggtaaagaaaatggcgccaattgatacggcgaaaggcttattcacctcaaaaaatattctcggtgactgcctggcatattttatgatggttagcgtgctgtacggattattaacctggatccccctgtatttagtcaaagagcgcggtttcgatgtaatgagtatgggcttcgtggccagtatgccgtgcatcggcggctttattggcgcgatcggcggcggatgggtttcggataagctattaggccgccggcgtaaacccaccatgatgttcactgcggtgtcaacggtggtcatgatgctaattatgctgaatatcccggccagcaccctggcagtttgtattggattattctttgtcggcttttgtttaaatatcggctggccagcctttaccgcgtacggtatggccgtttcggatagcaaaacctatccaatcgcctcttccataattaatagcggcggcaacctcggtggatttgtggcgccgatggcggctggtttcttgcttgataaaaccgggagttttaattctgtatttacctattttggtatctgcgccgccattggtttggtggtgattcttttcctcgatgaaccacaataacggaaatatatcctgttaattaatatgacgtaatgtcatggagtgaaactatgttattgaaagataaagtcgccattattactggcgcggcctccgcacgcggtttgggcttcgcgactgcgaaattattcgccgaaaacggcgcgaaagtggtcattatcgacctcaatggcgaagccagtaaaaccgccgcggcggcattaggcgaagaccatctcggcctggcggccaacgtcgctgatgaagtgcaggtgcaggcggccatcgaacagatcctggcgaaatacggtcgggttgatgtactggtcaataacgccgggattacccagccgctgaagctgatggatatcaagcgcgccaactatgacgcggtgcttgatgttagcctgcgcggcacgctgctgatgtcgcaggcggttatccccaccatgcgggcgcaaaaatccggcagcatcgtctgcatctcgtccgtctccgcccagcgcggcggcggtattttcggcggaccgcactacagcgcggcaaaagccggggtgctgggtctggcgcgggcgatggcgcgcgagcttggcccggataacgtccgcgttaactgcatcaccccggggctgattcagaccgacattaccgccggcaagctgactgatgacatgacggccaacattcttgccggcattccgatgaaccgccttggcgacgcgatagacatcgcgcgcgccgcgctgttcctcggcagcgatctttcctcctactccaccggcatcaccctggacgttaacggcggcatgttaattcactaagcgaggcaaacagatgaagatgaccgaatcacaaaaagtcgccgcggcggcgtggcgtattcgccgttacgccctgcaaatgggggaagtgcaggggcagggctatatcggccaggcgctgggctatgccgatgtgctcgccaccgccttcagccatgccatgacctatcgcccggaagatcccgagtgggaggggcgcgatcgcttcctgctctctcatggccattacgctatcgcttattatgccgcgctgctggaggcgggcattatcccggaagccgaactggaaacctacggctccgacgacagccgcctgccgatgtccggcatggcgacctacaccccggggatggagatgtccggcggctcgctggggcagggactgtccattgccgtcggcatggcgcttgggctgcggcagaaacagagcaaggcctgggtctacaactccatgtccgatggggagctggacgaagggtcgacctgggaggcggcgatgtcggcggctcactatggcctgagcaacctgattaaccttgtcgatgtcaacaaacagcaggctgacggcgattcacgcaaaatcctcggctttgagccgctgcaggataaatgggccgccttcggctggtacgtacagcgcgtggacggtaacgatctgccggcggtgatggccgcctttgacaacgcgaaaagttattccggcaatcagccgcgggtcattttatgcgacacgctgatgggcaaaggggtgccgttcctcgaaacccgcgataaaaaccattttattcgcgtcgatgccgacgaatggcaaaaagcgatcgcggtgctggacgctaacaaaccggaaggagtgctgtaatgagccagagtcaaccccgtttaaaaacgtcggcgatgatcgcctcgattgctgatgaaggccaggcgaccgtccctgcgcccttcggcgtcgcgctgtcaaaactggcggcgcagcgcccggaaatcgtcggcatgactgcggatctgtcaaaatataccgacctgcatattttcgcccaggccttcccggatcgctttttccagatgggcatggccgaacagctgctgatggcggcggcaggggggatggcgaaggagggatttattcctttcgccaccacctatgccgcctttgcaacccgtcgcgcctatgattttattcaccaggtcatcgccgaagagcatctgaacgtgaagatctgcgcggcgctgccgggcctgacgaccggctatggccccagccatcaggccaccgaagatctggcgatcatgcgcggtatccccgggatggttatcgtcgatccttgcgatgcgctggagatagagcaggcggtaccggccattgccgatcaccaggggccggtgtatatgcgtctgctgcgcggtaaggtgccgctggtgctggataaatatgactatcagttcgaactgggtaaggcgaagctgctggaggacggcaacgatgtgctgattatctcctccgggctgatgaccatgcgcgcgctggaggcggctgaaaagctgcgggccgataatatcggcgtggcggttctgcacgtgccgaccatcaaaccgctggatgagaaagcgattattgaacaggcgtcgaagccgggccgcctggtggtaactgcggagaaccacaccgcggtcggcggcctgggggaagcggtggccgcgctgctgatgcgtaagggcgtacgctgtgagctggatagcgtggggctgcccgacgcgttcctgttagccggcgccctgccgaccctccacgatcgctacggcatctccaccgcgaagattgtcgaaaaaattaagtatcgtctgcgttaaccgcactgctatgacccactggccgctgagcgcgctcagcggccttctcatgcccgccagccaggcgcggcattcttttgcagattttatgcggcctgtcacaaaatctgctagactgcgccccttcatggcattgtggtttttgccatctcttatcgcaataatctccctgaaaactacgcccttcaccgggccggggcggttcggagttgttatgtcttttgattcccttggcctgaatcccgatatcctgcgcgctgtcgctgagcagggctacgttgagccgacccctatccagcagcaggcgatcccggcggtactgcagggccgtgacctgatggctagcgcccagaccggcaccggtaaaacggcgggctttaccctgccgctgctgcagcgcctgatccagaatgagccgcacgcaaagggccgtcgtccggtgcgcgcgctgatcctgaccccgacccgtgagctggcggcgcaggtgggcgagaacgtccgcgattacagtaaatacctgaatattcgctcgctggtggtcttcggcggcgtgagcatcaacccgcagatgatgaagctgcgcggcggcgtcgacatcctcgtcgccaccccgggccgtctgctggacctcgaacatcagaacgccgtcagtcttgataaagttgaaatcctcgtgctggacgaagcggaccgtatgctggatatgggctttatccatgacatccgtcgcgtactggctaaactgccggcgcgtcgacagaatctgctgttctcggcgaccttctccgacgagatcaagggcctggccgagaaactgctgcacaacccgctggaagtggaagtggcgcgtcgtaacaccgcgtccgagcagatcacccagcacgtccattttgttgacaagaaccgcaagcgtgaactgctgtcgcagcttatcggcgaaggcaactggcagcaggtgctggtgtttacccgtaccaagcatggcgccaaccacctcgcggaacagctcaacaaagacggcatccgcagcgcggcgatccatggcaacaagagccagggagcgcgtacccgcgcgctggccgactttaaatccggcggcattcgagtgctggtggcgaccgatatcgccgcccgcggtctggatatcgaagagctgccgcacgtggtgaactacgagctgccgaacgtaccggaagattacgtccaccgtatcggccgtaccggtcgcgcggcggccaccggcgaagccttatcgctggtgtgcgtggatgagcataagctgctgcgcgatatcgagcgcctgctgaaaaaagagatcccgcgcatcgcgattgccggctatgaaccggatccgtccattaaagccgaacctatccagaacggtcgccagcagcgcggcggcggtcgcgggcaaggtcagggacgcggcggccagggtcagggacgcagcggacagccgcgcagccagaataatgccccacgccgtcaggacggcgaggcgccgaaagcgcgcactcaggacggcaaaccgccgcgccgccgtcgcccgcgtaaaccggctggcgaataacacgctgatgtccgggccgcgataacgcgccccggctcaggcccgtctgtccgctacgcggcggcgggcctttttctttccattacactatttgtcgagcaggcttccacactccgcagaaagcaatacctccgggcgggcaaaaatggcacaatagtggctgtttatacagtattcaggttttctcatggctttgaccgctgcgctgaaagcgcaaatcgccgcctggtataaggcgcttcaggaacagatcccggactttattccgcgtcccccgcagcggcagatgatcgccgatgtggcgaaaaccctcgccggggaagagggcaggcatctggctatcgaagcgccgaccggcgtcggcaaaacgctgtcatatctgatcccgggcatcgccatcgcccgcgaggaacaaaaaacgctggtggtcagcaccgccaacgtcgccctgcaggatcaaatctacagtaaggacctgccgctgctgcgtaaaatcattcccgacctgcgctttaccgccgccttcggtcgtgggcgctacgtctgtccgcgcaacctgacggcgctggccagcaccgagccgtcgcagcaggatctgctggcctttctcgatgacgatctcaccccgaataatcaggcggagcagaagctgtgcgcgaccctgaagcaggatctcgacagctaccgctgggacggcctgcgcgaccataccgacaaagccatcgacgatgggctatggagccggctgagcaccgataaggccagctgcctgaaccgcaactgccactactatcgcgagtgcccgttctttgtggcgcggcgggaaattcaggaggcggaagtggtggtggccaaccatgcgctggtgatggcggcgatggagagcgaagcggtgctgccggagccgaaaaacctgctgctggtcctcgatgaaggccatcatctgccggacgtcgcccgcgacgcgctggagatgagcgccgagatcaccgccccctggtttcgcctgcagctggatctattctgcaagctggtggctacctgcatggagcagtttcgtccgaaaaccacgccgccgctggccaatccggagcggctcaccgctcattgcgaagagcttttcgagctgattgcttcgttgaataatattctcaatctctatatgcccgccggtcaggaagcggagcatcgcttcccgatgggcgaactgccgcaggaggtgatggagatctgccagcggctggcgaagctcaccgagttgctgcgcggcctggcggagctgttcctgaacgatctcagcgaaaagaccggcagccatgacgtggtgcgcctgcatcgggtgctgctgcagatgaaccgcgcccttggcatgtttgaaagccaaagcaagctgtggcgcctggcgtcgctggcgcagtcctcaggcgcgccggtaaccaaatgggcgacgcgggtggtgcgcgatggccagatccacgtctggttccactgcgtcgggatccgcgtcagcgatcagcttgaacggctgctgtggcgcagcgtgccgcatatcgtggtgacgtcagcgacgctgcgctcgctaaacagcttctcgcgcctgcaggagatgagcggtctgaaggagaaagcgggggaccgcttcgtggcgctggattcgccgttcaaccacgtggagcaggggaaaattattattcctcaaatgcgttatgaaccgctgatggataacgaagagcagcacattgccgagatggcggcctattttcgccagcaggtggagagcaaaaaacatctcgggatgctggtgctgtttgccagcgggcgggcgatgaaccgcttcctcgagcatgtgaccgatctgcgcctgatgctgttggtgcagggcgaccagccgcgctaccggctggtggagctgcatcgcaaacgggtggaaagcggcgagcgcagcgtgctggtgggtctgcagtcctttgccgaaggtctcgatttaaaaggcgatctgctgagccaggtgcatatccataaaatcgcttttccgcccatcgacagcccggtagtgatcaccgaaggcgaatggctgaaaagcctcaatcgttatcccttcgaggtacagagtttgcccagcgcctcctttaatcttattcagcaggtggggcgtttgatccgtagccataactgctggggagaggtggtgatttacgataagcgtctgttgaccaaaaactacggcgcgcgtctactgaacgcgttacctgtttttcccatagagcagccgggcgttccggaggttatagtaaaacggaaagcaaaacagacagcaaaacagacgggccgcaaacgtcgctgacgccggcgcgtgatgcaccagggggagccatggagtacagcaaaattataaaagaggtgggtcgcggtaagaatcatgcccgcgatctcgatgaagagaccgcccgtgcgctctacgcgcggatgctgaacggcgaggtgccggagctggagctggggggaatattaatcgccctgcgcattaaaggcgaaggcgaagcggagatgaaaggtttttacgccgcgatgcagcagcatacgctgcgcctgaccccgccggccggcaagccgatgccgatcgttatccccagctacaacggcgcgcgcaagcaggcgaacctcacgccgctgctggcgatgctcctgcacaagctgggatttccggtggtggttcacggcgtcagtcacgatcccacccgggtgctgaccgaaaccatttttaccctgctggacattccggccaccctgcacgccggacaggctcaggcgcagctggagggccatgaaccggtgtatatcccggtgggggccttctgtccgccgctggagaaacagctggcgatgcgctggcggatgggcgtacgcaacagcgcccataccctggccaagctggccacgccgtttggcgaaggggaggcattgcgtctctccagcgtgtcgcatccggaatatgttccccgggtggcgaacttctttcgcgagaccggtggccgcgcgctgctgatgcatggtaccgagggcgaagtgtacgccaacccgcagcgctgtccgcagatcagcctgattgatgagcagagcgtgcgggtgctgtacgaacgccagactgagatggcagcggaggcggtggtcctgccgacctcgaaagaccctgaggtcaccgcgcgctggattgaacgctgcgtcgctggcgtcgaaccggtgcccacctcgttgaagatccagcttgcctgctgtctgctggcctgcggggaagtcacctcgctggagcagggcctcagccgcgtcaacgactgttggtgatcggatctgcaggataaaaaaaagcccgtccggtggctcggacgggcaaggcaagggtattaaaggtcttttcagggttaattcagtggcttacagatgggtgcagcgattatttatagataaccgcagtaccgctcagtttgttgttggtgttagcggaagtaatgctgtagccggtcgcgccagcggcttcggctttagcagccagttttgcttccagaccatctaaagtggttgcgccttgcgcagacaccacgccgatcttattcatgctttcagcctgagcgggggtaaccggttcggcggcaaaggcgccgaaggaaagagcggtcagagcgatggcagcggcagcatatttgatgtttttcatagttaatctctcgcaggttgttctgttcaggggacgatgttccgtcgatgtgataagtatcacgcttttctgcgggagataaaatcgaagtaaattcacagtctttatcgaattttttgaatgattaataatttactgattattaataaattatttctgcttcttttcgtctgacggcgaagcgaggaacaccggcgcgcttaagggcacatattgcgactttttccgccaaaaagtgtgcgcgaaaagataatgcgaaaggctgtcataaacggtaaaggaaagtcaacgtagctggctatccttggatccgcgacgattatatcctgaaaatgtattgttatgtaaatctttctcctgctggcactttacgcagtatctgacccctgggatggcctgtcgccgggcctccggaatcggctctccgcattcatcacaaaatttgttgctttcgccgcgcggaagctcgcggcgggcgcgagccaccgcatcgtcaatagtgctgtcgatctgatcctgtacggcgccgtcgcctgcccaacctgatgccatcgtctgcctcctgtaaaaggttattgataaattatagctgaaccgtacagccggttaccgctgctggcggcattgatccgccaggctatcgccccctggcggtgggccttatccgcgagggcggccgccaggtcgtccagggtgctggcgccgaaggcggagacggtgccgacagggcggagcggcccgttatagggcagtacgggtggcggtggcaggggagaggccgcggtggcatgagcggtgagcgccgcggcgaacagcagcgagacgaatttcatcagcatatcctcataaaccgcatgggacatagcttaagtgtaggtctttccagaccgcgcgacagggaatgtttaatgcaaaacagtgcgttttgcatgctaccggcgcaggggagcgctactctggccggtagattatttagcgggcgtcagggcggatcatgtcaaagcgcaggctgtcatcaataccgtaataggcgctcgggccaccggcgcgcaggatcggctgggcgcgggcggtttgatagataccgttgtccagtagtgattcatcgatatgcacggcgaccacttcaccgagcaccagccacgtatcgacagggttgccgtcggcggtggcgagttgaatacactgcgacagacggcactcaaagttcaccggactctccgcgacccgtggagcgctgaccaggcggctggcggcggcggtgaggccggcgcgcacgaattcgtcctcatggtgcggaatcgaggctgacgtttcattcatcgccatggccagcggtcgcgtcgccaggttccagacgaactcctttgtttcgacgatatttcgcacgctgtctttccagccgctactggcgaaaccaatgattggcggccgatagttaaagcagttaaaaaagctgtatggcgccagattacgctggccctcggcgtcctgggaggcgatccagcctatcgggcgaggcccgattatcgcgttcagcgggtcatgcggcaggccgtggccctgcgaaggttgataaaagtacatgctgcacctgtcacggataatggagatatccagactcccttatttaccgcgccgccgtcaacgggtatcttacgcggctgttcaaaggagattgtcatgaaagcccagaaaccggggttacacccgcgtaaccgccaccatcaacgctacgacctgcccgcgctctgccaggcccatcctgacctgcagggctacattacgctcaatccgctgggtgagcagaccattgattttgccaatccgcaggcggtgaaggcgttgaataaagcgctgctggcgcatttctacgcggtcaaacactgggacattcctgacggctttctctgtccgccagtgcctgggcgggccgactatattcatcatctggcggatctgctggccggggatagcggcgaggtgccgaaggatgccacgatccttgatattggcaccggcgcgaacctcatctatcccctgatcggcgctcacgagtatggctggcgctttaccggcagtgaaatcaacccgcaggcgttcgccagcgcgcaggcgattatcaatggcaacccgggcttgacccggcagatccgcctgcgccggcaaaaagagagccaggctatctttcacggcgtgatccataaaaacgagacctacgacgccacgctgtgtaatccgccgttccatgactccgcagagagcgcccgggcggggggcgagcgcaagcgccgcaacctcggactcggcgccgaaagtggcctcaattttggcggtcagcagcaggagctgtggtgcgaagggggcgaagtagcctttatctcgcagatgatccgcgaaagccaggccttcgcccgccaggtgaaatggtttacctcgctggtgtcgcgcggcgataatctgccgccgctctaccgcctgctgaccgaggtcggcgcagtgaaagtggtgaaaaaggagatggcccaggggcaaaagcaaagtcgctttatcgcctggagctttatggacgacgccaaacgccgtcgtccattctaacgctactcggcggccgggctgtcggcgcccggcatcggcagctgctgccaggtctgtaccggcgcgcgaaccccggcgcggtcgaagtgctttttcacctgggtgtcgagggcaaaacgcaccgtccactgcttcagcggcagggtggtgaagctgacgcgtagcgtaaaggcggtattgctcagccccaccagcccggcgaacgacggttcgccaatgatcagaccgcggatctcctcctgggccagcagatcgtccaccgccgccttcagcgcctggctggctttatccagatcctcatggcggtcaacgtcatagttagccacaaccgagccaatgccgcgcacgaagttggcaaaggtggtgatcgaggaccagggaataatgtgataggcgccggtatcctgacgtacccccacggagcgaatcgacattcgttccacggtgccggtcaaaggaccgatggtgaccaggtcgccggtgttcatcccgttctcaaactggataaatatgccagtgataatgtctttgaccagggtttgcgcaccaaacgaaatggccagccctaacgccccggcgcccgccagcagcggcgcaatgtttaccccaatttccgagagcaggatcatcaccgtgatggtgctgatcaccaccgccagcgcgttgcgaaacagcgtcagcagcgtccgggcccgcgcgctgggcagcggacggccatgaatatccgatgccagccggttttcaatcaggctggccagaaccgtccagccgatggcggagaagaagaggatcagggcgatgcggatcagcacatccaccgttttttgcccggcatcgttgtgcagccattcccggaagtcaaacaggccccaggcgctcaacagcagcatgatggcgacacagacggtgagaatgcgcgccgccttcagcgaggcggagatccagccattcagccgcttttgcagttcagggtagttgcgctgagtggcgggcgacagggtgatggttttggctatccagcgcgacaggatgccagacaccagcgccgcgccgccgataatcgccaggctttgcagggtggcgcccatcatgaatttcaggctgttgcccgggtcgaacagggaaaagaaaaaaagcaccacaaagtaggcgcaggccagccagtgccagaccagcgcgaaggcgcggataaacaggctaaagaaagcgagtgagtggtcggccaggtggatcaacccttgagtaatcaccgctttgttatgaaaaatcaggtacagcgcccacagcgtaatgcacagcatgatgacgacgttagccagcgcgccaacctgaacattcacctgattggaaataatcggcaccgcgacgatcagaccgtaaccaatcaggctgctgagcgcgctcaggcgcaggctccagtatgacgcggcctcgtcgctgaggttaaagggccgcagggcaggaatgcgcgggcagaaaatgagccgcagaatagctttaaaaaactcgatcagcgcgaaggcgttgaggaaaaggctctgctggaaggcgatggtagggttattcccattcaggcgatcgcttagcagctgaccgacaaacagggttagcgccagcagcagcaggtcgatgataaacgccccggcgatggtcaggggcagctggagccagttaccgcgatcgcggtttttatgccgtccccattcgcccattttgcgatacagcggcagcgccgcgaggcgtaccagccaccagaaggcaaacaccagcccggccagcagtaaaaaatgccaggccgcgctggtaaaggtttgcggattaaagggcttatgcggtgagccggtgatattgcgccacagctgggaaaagcgtgatgagagctgttcgccatattcccggcttatctgggtgacgttctccagtaccgtggtctcttctttcaccgcaggtggcgtcagcgtcggggtgctgtcgggcggcggcgtggcggctgctttacgcagctggtcaatgagctcctgacgggcggagtcgttggccagcacatcggccagtgcggcataagccgctcttttctgttccacatcgggttcgctggcgctgtttttatcagtgttagccgtcggcacgccggggagggtggcggcggaaagcggggcagtaaacagtgcagcgagcaaaagcaggatccacggcatgggcacctccgttgcaacgtaaacgggtaagtatagaagccgctggcggaaggggagggaagaggattctggaaaagcggctctcatcgtgggagagagagccgttgcgggtcaggcgacgtgttgcaggaattcgcgcaggcgcgggctgggcgggttcttcaccagctcctggggattgccgtcttcagcaattcgtcctttgtcgataaagattagtcgcgaggccactttttcggcaaagccgatttcgtgggtcacaatcaccatcgtcatgccctcttccgccaggtcctgcatcaccttgagcacttcatggcgcagctccgggtcgagcgcggaggtcggttcatcaaacagcatcatcttcggcttcaccgccagcgcgcgggcgatggccacacgctgttgctggccgccggagagttcggacggatagtgatgcgcgcgctcagccagaccgactttcgccagcagctctttcgcctgcttctctgccgcctgcttgctggcgccgcgtacccgcagcgggccaaacatcacgttttccagcgccgtgaggtgcgggaacagataaaactgctggaaaaccatcccggcttcctgacgaatcagacgttcgtccaccttcgggtcgttgaccttcagaccatcgacaatcagatcgccgctggtgatctcttccagcttattgatgcagcgcagcatcgttgatttaccggaaccggaagggccgataatgaccaccacttcaccctgattaattttcagagagatatcgtgtagcacctgggtcggaccaaagtgcttggagacgtttttaaattcaatcacaggattttcatccttctttcaagacgacgcagaataaagctcaggaccagggtgataatcaggtagatcacggctacggcgctccagatttccagcgcgcggaagttgcccgcgatgatctcctgtccctgacgggtcagttcggcgacgccgatgacgatgaacagcgaggtatccttgatgctgatgatccactggttgcccagcggcggcagcatgcggcgcagcgccagcggcaggatcacgtggcgaatggtttcgcgacgcgacaggccaagcgccaggcccgcttcgcggaagcctttatgtatggagagcaccgcgccgcgggtgatttccgcgatataggcgcccgagtttatcatgatggtcactaccgccgcggagaaggggtcgatgcgcagatcgctaaaggccatcggcagcgcaaagtagatgaacataacctgcaccacaatcggggtgccgcgaatgatttcaataaagaccagcgcgatgtggttggcgatccagccgccgaagcagcgggcgaaaccggccaccagaccaattatcagaccgccggccaggccgaggacggaaatccacagcgtcattttggcgccttccagcaaaatcggaatggcaggccagatggcactccagtcaaactgcataatacgttcctgttaccgtgtcgagagcagaggaaagcctccgccaaaataccgtctcccgctgagcctgtgccggaagaccgttgtggtgtcgccggacctcggtccggcgaagtacgtttttattatttgggttcagtgccgaaccattttttataaatttcgttataggtaccattgtcgcgcagcgttttcagcgcaccgttcactttctcacgcagctcgtcgctgcctttcgggaaggcgataccgtagttttgcgcttccagtgattcgcctaccgctttgaacttaccgttgcccgcggttttgatgaagtacagaatattcggcgtatcgtgcagcacggcatccgcgcgaccggttcccagctccatataggcgttatcgatgttcgggaactgacgcagatctttggttttgatattggctttcgcgtagtcaacggagccggtgccgctcttcaccgcgaccactttaccgttcagatctttgacatctttgatgtcgttattattggcgttgaccatcaccagcaggccgcttttgtagtagccgtcggagaagtcgatcgcttttttacgctcgtcggtaatggtgatccccgccagcgccagatcgatatttttggtttgcagcgccgggataatgccgctgaagtccattggcttcagggtgtagtcgagcttcagctctttggcgatagccgcccacaggtcaacgtcaaaacccacatacttatcgccttgcttaaattcgaacgggacgaacgccgtatcggtggcgacaaccagggtcttattagcggcatgggaagaaaccgcaaaagccagggtcagtgcagccagtgaaactttaaatacagacttcatagcatttccttttatatccacgggacgatcccctgcgagaacgactagcctaatgaaaaaatcgtgccacttttacaagctgttgtttttcaacaaacgaagcgtaagtcgttgcacaagatcgatcatttcaggcagtgactgcaccatggtggggcgtcattttggtgcgtcataagggtgctgaattaccagcccagttttagcgcaaaccctgatgggaaaacaatctcgacgtaacgattgtgtgaggtgattattacaatctttttacttttgcgcgcattttcatcaatctggtgccctgaaacggtgcaaggccagtggaggatgaaaagcaaaggatggaatatagggcagggagaaacgctgaggcgccgccgaccgcgctgggccggcggcaaagccttactcgatgttggcttcaatgaaccacaggaatttatccagatcgcgggaagccgcggtgaagatatctgcagtgtcttcgtcttttgcttcgtcgatcgccttacgcacatcgttcgccactaccgcgtagcggtcagccagggctttcaggtgatcctgaacgtgatggatgtccagcgggtagctctgcagcggggttttgctgttaatgacctgagtggtacccagggcgacgccgcccagctgcaccgcgcgctcggccatggtgtccagatgttcggtcagcgcggtacggaagccatccagcatttcgtgcacggcgataaagttcgcaccgcgcatattccagtgtgcctgcttggtgataagtgacaggtcaatgaactggatcacctggcgattcaacagctcaatggtcgctttcttttcgctgtcagcgacatcgttgcgggtatagaccagattagacgcttttgatttaaccagttttgcggtactcatcgtttcatatcctcttgatattgatgctcatcacacttcagatctgaatgatgtggagcgttgtcccaaatgacttcggaaataagtatagcaagggttttcaagagtgaggcatcggcaggctatatcactccgatagcgcaaagtggttggttattttaaaaatatttaaatatcaggtgtttatattcggctgaacggcccggatttctctcgagccggcgccgtaacagaatgttaattgatatcgacctgctcgactttactctgccgttgcatagtcagcgtggcgcccatcgaggcgataatgatcgcgccgagcgccagggtctgggagagcttcagcgtttcaccgaggaagatcataccggagagggctgctaacgctggctcaaggctcatcagcgtgccgaaggtgcgcgtcggcaagcgcgtcagggccatcatctcgagggagtagggcagcgcggtagagagaatcgcgatccccaaacccagcggcagcagcgaccactgccacagcgtatcggtggcctgcgccatacctaacggcacaaacaccagcgaggcgatgagcgaccccatcgctaccgtggctggaccatgctcttcaccggcacgctgtccggtcagaatatagaccgcccagcacgccccggcgccgagggcgaacagcgcgccggttaaatcgacctgcgccacgttctgccccagcggcagaagataccatagtccgaggatcgccagcgccacccagacaaaatccagcgggcggcgcgaaccaaacagcgccaccgccagcgggccggtaaactccagggccaccgccacgccgagcggaatgcgctgcagggataaataaaagagatagttcatcgccccgagcgccaggccgtacagtagcagcggcacgcgctgcgccggggagaaacgtagccgccatggcttgaacaccaccaccagaatcagcgttcccagcgccagacgcagggcggtgacgcccggggcgccgaccaccgggaacagcgatttagcaagcgatgcgccgctttgaatcgaggtcatggcgactaaaatcaccagtatcggcaaccatgccgccgcttttctggatggaccgggcatcctttctcctgtcaggttttgtcaaaaggggtaaaagttccagtgtactggaattacctgccggcggttgagctaatgttgaaaaaaacaggggcaaaaacagtacaatggcgaaaactgctgagaaattcaccaggcggttaggattaatctggatgcttgcgaatttcttaatgagcgttaagatgtaagttaacgccaaaaattgttgttttccatattgttacagaaatatggaaacttttggttacatgaaaaagtatgttagacaatgtaaactccaaagagtttcccaaaagtttttgatatatttaaggcttaggacttattagaaacacatttgaggtggttatgaataaaattgcacgtctttcagcactggccgttgttctggctgcatccgtaggtaccactgcatttgctgcaacttctaccgtaaccggcggttacgcgcagagcgacatgcagggtaaagcgaacaaagctggcggtttcaacctgaaataccgttacgagcaagataacaacccgctgggcgttatcggttccttcacctacaccgagaaggataacaacagcaacggtacttacaacaaaggtcagtactacggcatcaccgctggtccggcttaccgtctgaacgactgggcaagcatctacggcgtagtgggtgttggttacggtaaattccagaacaacaactaccctcataaatccgatatgagcgactacggtttctcctacggtgctggtctgcagttcaacccgatcgaaaacgttgctctggacttctcctacgagcagtctcgtattcgtaacgttgacgtcggcacctggattgctggcgtgggttaccgcttctaatcactccggtgatatgaaaaatccgcctctcggggcggattttttttgcctgctgacggccggcccgggcgactggccgggccggcgcgattaattgactgtgaactcatcggtaccgaggtgagcgtagtccaccttctgcagctggaagttggtgatgtacaccggaccggccttttgttcagagataaaccgatagcgtggggtgatttccgtcgcctggatcccggtccactgggagaagaaactgaggaaatcattcgccgaacgctgcgccttaatcactttatgcgctttgtcatcgctggatagcaccataaacggcacctggaagttctgctggaacttatcgtcatgcgccagatactgcacctctttgccccgctccttgaacgccagaccatgatcggaaaaataggtcagggaaaaagtgtcaccggaattttgcaactgatgataaagcttagccagcagcgaatcggtctgcgtcatgctgtagaggtagcatgaggtctctttcgactgaacgaaaaccgtgtatttgcccttggtccgatcgcaggcctgtgggtgagagcccatcaggtgcaggacaatcagctgcggctgggtacgctgggttgagagcacctgctcggtcagcttcagcaactgctcgtcctgggtgtttttattggcttcgaaatcgccgtttttcaggaactgtacttcatccgcccgtttggcgatgctggcgatagcggtgtcgtactcgccaatttgcccctggttggagaaccaccaggtctggaaaccggcgcggttggcgagggtgacaaagttatcctgatactgtggtttgccatcgaccacccggttaagcgtcaggccgagcgatttctgcgttgagccgctggcggcgatgtagttgttaaacagataaccgtttaccgagctggcaaacggcgtgttgtcccaatggccaccgaaagcgccgagggcatcgcggcgcgcgctttcaccgatcaccaccacatagagatggtattttggctttaccgccagcacgtgccagctgtctttcatgccagccagctgcgccatccgggcctgttcgtccagcacctcgttgttattcaccaccacgtctttgacaaaacgaaaggccggataaccggtgtcaatcaccttgaatacaccgccccaggcaaggttttgcaccggctggagaaagaagatcccgatgctgaacaacaggcccagcgtatccatttttccccagcgtgatggctcaacgatcctacgacgaaccgcaatgaccccgagagcgaagatgaagaccgccagcagatagttgtaccacgggaagatggtcaggatttccgtagactcttccacgttggtggcgtgcagcgccagcagagtgttgaagttgggggcaccgtaggcctggccaaagggatagtacagagccgccagcagggaataggcgccgaccaccgctttctggacgcgcggaaaggcgcgccacagcatatgtaacacgcaggtaaatgccacggtataaagcaggctaaattcatagcccagcgccaggttaattaacagcgactgtaaaaagtagaatcccgtccatgggttcagtgccagtcggcgggcgaccagcgtatctttcagggtggtgacattcatagtaaacaatcaaaaagaggccatgcgcatcccctggcgtcaaggggtaaaacctgctggacagtgcgtgaagagggtctctgcgagccgcgaatgtggcagggctgtgcaaagatagggcttgtaaatggtaaggtcaaccagacataacagattgttttgcgagggcgcttacaaaacttgaaaaaaggtcagggaaacggggggaaccggtcattttaccggcagaaaatgacagaaaaatgaagcggcgtaccgcgacgccgccttaggaattgggtttgccctgctgcggtttaccgttgatcatctcgcacagcataccgatcagcatcaatcgtactttaaagggggaatggctaaacacgtttatgcacctcttgaattcattcatctgctctcctcctgccagttcgctccgtcattccctgatggatgtttgcattatatacagatatagcacaggctatattttatagctatggctaaaacgttaattttttgtgctcttggcgcaatccattacaatgtggatctttttatacgatgcttgacgcgtcacacgaatgaggaagcacaatgaaccgtcgcgcaggtaagccaataacaaaaaaagtgacgcagttagtgaatgttgaagagcacgtggaagggtttcgccaggtgcgggaagcgcatcgccgcgagctgatcgatgactatgtggagctgatctccgatctgatcaacgaagtgggcgaggcgcgccaggtggatatggccgcgcgtcttggcgtttcgcaaccgacggtcgctaaaatgctcaaacgcctggccagcgtcggtcttattgaacagatcccctggcgcgggatcttcttaaccccggaaggtgagaagctagcccaggagagccgcgagcgccatcaaatcgtggagaacttcctgctggcgatcggcgtcagcgcggagattgcccgacgtgatgcggaagggatggagcatcacgtgagcgaagagacgctggcgatgttcctgaaatttacccaaacacagggatctcaggaagcatgactcttcccttcgtccagtcgctgctgcgcgatcgttttctccatttgctgctgattatcgcctgcgtgctcagcgccatcgtgccgtttgtcccggcaagctggccggcggccattgactggcataccatcgtcacgcttagcggcctgatgttgttgactaaggggatcgaactgagcggctattttgacgtgctgggccgaaaaatggcccgccgctttgtgactgagcgccagctggccatctttatggtgctggcggcggcgctgttgtctacctttcttaccaacgacgttgcgctgtttattgtggtgccgttgacgctgacgctaaaaaaatggtgcgccatcccggtgaaccggctgattattttcgaagcgttggcggtgaacgccggttcgctgctgacgccgatcggcaacccgcagaatattttgctgtggggacgatccggcctctctttcttcgggtttatcggtcagatgctgcctctggcagcggcgatgatgctgaccctgctggcgctgtgctggttctgttttccggcgaagcggctcagttaccagagcagcgacagggcgccgtcatggcaacccaagctcgtctggagctgtctgggactgtatgtggtgtttctgacggcgctggagatgaatcaggccctgtgggggctggcgctggtgctgctgggcttcctggtgctggcccgggcggtgatcgtccatgtcgactggtcgctgttgctggtgtttatggtgatgtttattgacgtccatctgctgacccagcttccggcgctgcaccaggtgctgagcggggtggggaccctctccggcggtggactgtggctgaccgctattggcctgtcgcaggtgatcagtaatgtgccctcgactattctgttgctcaactatgtcccgccgtcaatactgctcgcctgggcggttaacgtgggcggctttggcctgctgccgggctcgctggccaatattatcgccctgcgtatggccagcgatcggcgcatctggtggcgcttccatctctactccattccaatgctgctatgggcggcactcagcggctactggctcttcaaactcagcgcctgatctcaacagaatcgcgccatcattcacttcgatcgccaggatcgcctttcggggcgatctttttttgtccggctcacagaaaccgatcccggcctttgcttaccttttcactttccggtatatgactagtcattacgtttaaatgactagtcatataccgaggcgcagcatgaagaacagactaccggcagattttttatggggaaattccgtctccagcatgcagacggagggggcgtggaacgagggtggcaaggggatgtcggtgtatgatatccgtcaaccggcggagttcgcctccgactggaaggtggcgaccgactcttatcatcgttatcgggaagatttcgatttgatgcaggatctgggcatgaactgctaccgttttcagatcgcctggagccgggtgtgccctgacggagatggcgaattcaatgaacaggggattgccttctaccatcaatttatagatgaactgatcgcccgcggcattgagccgatgatctgcctgtaccacttcgatatgccgctgtcgctggcggagcgctacaacggttttaccgaccgccgggtgatggacgcttttatccgctacggccagaagatgatcgcctgctatggcgacaaggtgaaatattggctcacctttaatgagcagaatctgtaccattcgccggaagcgtttctgatttccggctatctgcagggggagaagaccctgcgcgaactgtatctgatccagcatcatgtgatgatggcgcacgtccatctgactcactatctgcaccagacgaagccgcagtgtctgatgggcggaatgctggctcacgctctggtctatccggctacctgcaaaccacgcgatatcctctgcgcccagcagctggatgagttcttaaaccagaacctgctgcgcgcctacgcgggtgagggttatagcccggaggtgatgcattttgtcgccgcggaagggttcgatgatatctatcggcgggaggatctcgccctgatggcgacggtgaaggtcgattatctggcgttcagctattacgccagccgcacattgaacagcgacgcgatcccgccgggaacggcggtcaacaactatatgctgtttggcaaccaggataacccgttcctgaaagcgacggaatggaactggcagattgatccgctgggcttccggacgatcatcactcgttactataacgattggcgcctgccggtgttcccgattgaaaacggcatcggggtgattgagtcctgggacggcgaacatcccattgccgatgattaccgcatcgcttaccatcgcgaccatatcaacgccatgaaagcggccatctttgaggatggggcgcaggtgatcggctatctcggctggggattaatcgatatcctgagctcacagggcgatatgcgtaagcgctacggcgtggtgtacgtcaatcgcgaaaaccatgacctcaaggacctgcggcgggtgccgaagaagagctatgcatggctgaagcaggtgttccgcagcaacggcgaagcgatgtaacgctgccctggcggtcagatggtgtatccagcccgccagccactcactgaatggataaggaccgggaaatgacggcgaagtatctgcaaatcgcgcgggaaataaaaaaacgcatcatcagccagcagtatcctgccagcgcgccgctacccgaccagtttgcgctggcggcggagttcagcaccagccggatgaccatccagcaggcgatgcgccagttaatcgtcgaagggctgatctatacccgaaaagggcagggcacctttgtgcggaaaaatttccttcagctgtcgcagtgggagctgcccggcagcgactatttcggcgccaccaaaacctgggagcatcttggcgaggtgcaaagcgaagtggtgcgctttgcggtgcgctttcccagcgacaaggagcaaagttcgctgcttatcgacgccgatgccccggtgtatgactttgttcgcctgcggctgctcaacggcgagccggtatccctggatctgacggtcatgccggtggggctggtgccggggttaaccaaaagccatctggaaggttccgtgtttcgctatgtgcaggagacgctggggctgaagctgatgggatcttaccgcgtggtgcgggcgatgaagcccggggaactggataaacagcatcttcactgcgaaccgaccgatccggtgctggaggtggagcaggttatctatctggaggatggcacgccgctggagtacgcccactgccattatcgctacgatcacggcgggattattctggtgaataacggctaggccggggctcctgctggcgctgcgcatagcggggttacggcgtggtagggtttggtagcccgggcgagcgttagccgcctcgagggaaaatgccgataaaaaaacggcgggcatcaggcccgccgtttttcttgtcagcacaacttagttcagacgcaccggcataccggagcggttctggatagcctgctcaaccacgttctgatcgacatcagactggctggtaactgcctgtaccggctgagtcagggtgatcggcacgatctcgccgccctggaactgcgcttcggtggtcgacagcgggttgtgcacctcgatgtaacggctgccgtccggctcggtggtcgcttttaccggctcatcgataaactgtacgcgggtgccgaccggcacgttctcaaacaggaatttgatgtcatcgttacgcagacgcacgcagccgtggctcacgcgcaggccgataccgaagttagcgttggtgccgtggatggcgtacagacggccgatatacagcgcgtacagccccatcgggttatccggaccggccggtacgacggcgggcagcgggttgccggcggcggcgtattcagcatgcattttggcggtcggtgtccaggtcgggccggccttcttgcgttcgactttggtggtccagttgatcggcgtatctttacctaactggccgataccgatcggcagaacgatcacggtattggtgcctttcgggtagtagtacagacgcatttccgcgctgttgataatgatcccttcatgcacggtatccggcagaatcagctgctgagggatgttcaggacgctaccgcccttcggcaggtaagtatccacccccgggttggcttccagcatgttggaaagccccatctgatatttcgccgcgaagtattccagcggctgtttattatcatccggaatggtaatgacctgattctgaccaaccaaacggctgccatcggttggcaaaggataggtgacagcagacgctgtattgcaaaagcctacgatggcgaaggctgccgctaagagtgtagataatttcatagtctttaatgtcgtgtgcgaaatcaacgccacacaggcctttgttaatgattgagacagtagatgggagcgcattatatgtgcattccgctgaacaggtaaatcagatgtgtacgaaatcacatttttttccctgttgcctcggctgccgcggtccggcaggcggccgaagcatcgctcgccgcgcgggtaacgggcggttactcttccagcagccgggcctgcagcgcggcgcgaaccggcgccgtaagctggtactctgccgccagccaggcgtcgacggtgccatagcgctggtgaatagccgacagcgcggcggcgagataggactcttttaccgtcagaatatccgccaggctttggcgcccctgggcagtgaggtcgttgccgagcagctccaacatccaggcctccacctgcgtcagcatgccgtgggtaaggagatactcctccatcaccgtttcgctgtcgcagccgacggcgaacagcgttaacgcgcagccgacgccggtgcgatctttgccgaccgcgcagtgttgcagtaaagcgccttcaaaaggcgtggtcagccaggcggcgagctggcgataggccgggttgttaaacggcagctggcggtagagttgcagcataaactgctcgccgttcagcgcgttaagggtggcggcattcagctcggtgaccttcgcatttacctcgctcaccggcggattggccggcgcgttaagataatgggtaagcgggctaagcttgtccggagtacgggctacctctccggggtcgcgatagtcgagcacccggctgagcggcaaagtatcgaggtggttgagatcctccgccgttaaccggtttagcgcgccggatcgcaatagcttgccgctgcggacgcggcgtccgtcggcggcaagctggccgcccaggtcgcgaaaattgatgccgccctgcagggataaaaaagccgggtgtcgcgataggctgctggtcatgggactccttataaatacgtacagaataaccgtttgagcgcgggtttccggctcatctgacaaagaccttagcacaagcgccgcggtggaatttaccgcaggccgtgaaaagtgtgtcatttgctggcataatgtctgctgtatcacacccctcatactcttttttcaggatatccccgtgctagtatccagcaacgttaccatgcagtttggcagtaagccgctgttcgaaaatatctccgttaaatttggcggcggcaaccgttatggtctgatcggcgccaacggcagcggtaaatcgacctttatgaagatcctcggcggcgatctcgaaccgacgctgggcaacgtttctctcgacccgaacgagcgcatcggtaagctgcgtcaggatcagttcgcctttgaagcgttcaccgtgctggatacggtcatcatgggccacggcgagctgtgggaagtgaagcaggagcgcgatcgtatctacgccctcgctgagatgagcgaagaagatggctacaaagtggccgacctggaagtcaaatatggcgaaatggacggctactcggcggaagcgcgcgccggcgaactgctgctcggcgtcggcattccggttgaacagcattatggcccgatgagcgaagtcgcgccgggctggaagctgcgcgtcctgctggcgcaggcgctgttttccaatccggatatcctgctgctcgatgaaccgaccaacaacctggacatcgacaccattcgctggctggagcagacgctgaacgatcgcgacagcactatgattatcatttcgcacgaccgtcacttcctgaacatggtctgcacccacatggcggatctcgactacggcgagctgcgcgtgtatccgggcaactacgacgaatacatgaccgcggccacccaggcgcgtgagcgtctgctggcggacaacgccaagaaaaaagcgcagattgcggacctgcagtccttcgttagccgcttcagcgccaacgcctctaaatcgcgtcaggccacctcgcgcgcgcgccagattgacaaaatcaagctggaagaggttaaagcctccagccgtcagaacccatttatccgcttcgagcaggataagaaactgttccgtaacgcgctggaagtggaagcccttaccaaaggctttgatgaaggtccgctgttcaaaaacgtcaacctgctgctggaagtgggcgaaaagatcgccattctgggcgccaacggcgtgggtaaatccaccatgctgaaaaccctggtaggcgaactgcagccggacaacggcagcgtgaaatggtctgaaaacgcgcaaatcggctactacgcgcaggaccatgagtacgagttcgaaaacgacctgacggtcttcgaatggatgagccagtggaagcaggaaggcgacgacgagcaggcagtacgcagcatcctcggccgtctgctgtttagccaggacgatatcaaaaagccggcgaaggtactttccggtggcgagaaagggcgcatgctgttcggtaagctgatgatgcagaagccaaacatcctggtgatggacgaaccgaccaaccacctggatatggagtcgattgaatcgctgaacatggcgctggagatgtatcagggcaccctgatctttgtctcccacgaccgtgagtttgtcagctcgctggcgacccgcgtcctggagatcactccggaccgcgtgatcgacttcagcggcaactacgaagactacctgcgcagcaaaggtatcgagtaatccctgtccgttacccgggtagcggctacgccttacccgggcgacacgcggtgccgtttttttgtcgggtggcggctaacgccttacccgacctacggttcttgcgacctgcctttaatgtcttcaccgcgctggctgaaactaccggcctatggtcagaacctccactccgttccttcaacgccattcaccagcagcttacgcttttctcctaccggtaatgacagcttcagcgctttccacgccgggcgatagttgccgcgggcgttgatatccaggtttatgctgttggcgctgcaggtcatttcccactccagccatagcgcatccccctgtttatagccccagctttcgccgtcgtcttcaaacagcagaccgcgggttgagccggtacctttcagcgggaacagctgcagttcgcgacgatcgtctttttgcgcatcgacatggctgatacgttcactaagcggcagaccagcgccggcgcggaccaacagcggcagtttttccagcggcgcgtccagcgtcacccactggccgccggcgaaccactgatggctgtagaaatcgtaccaaccggcctgattatccggcagccatacttcacgctggcgggcgcccggctcgaccacgctggccaccagcaggtcgcggcccagcaggaagtcatcgcattcggcgaaggtctgcgcatcgtgctggtgatcgaggaaggtcgggcggagcatcggctcatcatcagcatgcgcctgccatagcagagtgtacagatagggcagcaggcggtagcgtagctcaatggctgagcggatcgccggagtgacggccggatacatccatgcttcgtttaccgtctggtcgtcattccacgagtgaatggtaaagcgcggatgcatgacgccattttgtacccagcgcacaaacagttccggctcgggtttatcgccggagaaaccgccgacgtcgtggccgacgttaaacagcccggaaaggctcatccccaggcccatgcggatgttatagcgcagcgtatcccagttggtgcggttgtcgccgctccaggtctggacgtagcgctgcatcccggcgcagccggagcgggagatcagatatgggcgcttttgcggcgcaaagcgctgctgggcttccagcgaggcgcgcatcatcaacagcggcatcaccgggcgaatatgtttgatggcgatttcgcggccaaagccgtagcagcgggcttcgccgtcccatacttcgtattcgttattatcgttccaggtcgaatcgatgcccatctccagtagctgggtggtcacgccttcctgccaccaggccacggtttgcggattggtgaaatcgagatgcgacccttcatcatcccagaagctggaacgctccggagcgtcagtttgcgaatcgcgaatgaagagaccgcgctccgccacctcgccgtaacgcgggtgatcctgcagcaggcacggtttgatattggcggccagcttcagcccggcatcgtgaaacgactggctcatcactttgggctgcggcaccttgtcgtagttccagttaaagacgtagcgcttgccgttgattgaggtatagccggaagagagctggaacgaatcgcaggggatcgcgtgctgctcgcacaggcggataaagttcatcagctgattttgcgcatccggcgcgtcggtatagtgcatggtggagccgctgtagccgaggctccatttgggtccaaacagcgttttaccggtcaggcgaacgaaggctttggtcacatccagcacctgcttaccggtaaacaggtaataatcgatgtcgccggcttccgcctgccagcggcgataggcggtgtggtagttgtcgatctcgttccccagatccagccagcagctgctcaggttgtcatagaacaggccgtagctgatatcgctgcgctgggtgatggtgaacggaatatgtttatacagcgggtcggtgctgacggcgttgtagcccatggcatcgaggttacgcatctcatagcgtttaccggtgcgctgcaggtcgccggccttttcgcccaggccgtaaaaacgctcgtctttgcggcggctcagataatgggcgacgccgtcgccgtgggcattcgccagataggcgctggtcggacggtcattggcaagcggctgccattcgccggcctcgtcgcgatagctccactccagccacagcggctggtgaacggtgatgcgcagctggcgggtggcgatagtcagcgtatcgccctcctgggccagctgccaggccgggagactaaaaccgctgaggtcatcccgggcgcggccttcccacggcacatcctgctgcggagcgatgctccaggtgcgatccagcgccagctggccctggcgttttagcaggacgcggaacaaattctcttccagtacgtacaggcacagggtgtgctggccatcgaccgtcagttcaacgtgatgctccagctgttgatgcaaactccagtgtttcagcgtcttcatattttacatccactctcaggcgcgcttggcgcgacgttcagcaataaatgccaccaggaaaacggcgccaatcaggtcaaagaaacccatggcgataaatagcgggttgaagccgattttgtcggcggtcaccccgattaataacgagaacaagaagctggcgatccacgctgcggagccgcgcataccgttgaccgtcgccatttgtcccttgtcgaaagactccaccaccagcgcgctgagcatgcaggagatgatctgatggccgaagccgccaatggagatcaggatgatggtgatatagggatcgcgggtgatggcgacgagggccagggagagcatcaggaacgcgccggttaccgagctggcgatcaccgagttcactcgcgtacagccgaaccagcgaacatacaggcgggtgaggtagccgctgaccacgctgccgagatcggcggcgagaaacggcagccaggcgaacatggcgatctgcttcaaatccatgccgtgctctttcgccaggtacagcggcacccagaaactcagcaccgcccaggcgggctcggccataaaggcgggaatggcgatcccgtagaaacgtttatttttcgagacggttttgagcgcggtaaagaagggctgttttaccggcggggcttcgttatcctgtttgatgtactccagctcgcttttgctgagattggggtgcttttccggggtctgatagaaggcccaccatagtactacccacagtagcgccagcgcgccggtaaacataaacgccccttgccagccgaaggaggcgtgggcgaagtagatgatcggcggggccagcatcgcgccgatggagaacccaacgccagcccagccggcggcaatcgggcgttcagatttcggaaaccattcgccgatggttttggcgttggccggagtagcggccgcctcggccccacccataaagaagcgcaacatagccaggtgcagccagctaccggccccggcgtgggcgatacaggccagcgcccacagggtggcgcagatcataaagccaagcttcaggccgatgacgtcgataagccagccgcacagcggctggaaaatcgtgtaagccagctgaaacgcgccgacgatccacgagtattgttcggtagtaatgccgagggtcgctttcagttccggcgcgataattcccagcgagttgcgtgtgatgtagttgacggtaacgccaagtaaaaacaggaccagcacccaccagcgcaggtttttcaccacccggcgcgttttgctgacggcgatatcattgttgaggccttgactcatagcacactccacaagacgtttgtaggggaaagtgacggtctcactccctgagtggtcacgtagatttattaactatttgaatagtctatttttaatctcaacatcattggtataactagtatgggagatgttggaccaattcaggctagggcagaaaaatcgtctggcaaagcgctatttatgcaagttttttcatgaaatgagcgagatcgcatatttgacagcggaatttgcttgtaacgtgtgctttggtgattatgaaaattctttcatttttcaatcggagctggatcacaaaatggataaaaagctgcgcgtcgccgaaattgccgcccgcaccgggctatcgcccagcaccgtttcacgcgtcctggccgggaaagcgaataccagcgacaaggcgcgccgggcggtgctggagtgcgcccgcgagctgggtgtcatgcaggggttggccgccgggcgtctgctgctcaatcatctgctggtgtttgccccgcagcgcgcattcgatgagcgatcggatatcttctactaccgggtgatccagagcatcaataacgcgctggcggcgcatgaagtgcgcctgcgctactgcgcgctggatgagaacgacagcgacgccaacctgtttcttgcccgcatgaatgaacctgagacccaggccgcggtgctgctggggatcgacgatccgcatattcatggcctggcggcggatctgggcaaaccctgcgtattgatcaactgtcgggatgaagggatgcggctgccgtccatcgctcccgatcatcggctgatcggccagtgcgcggcccgctatctgtttgatatggggcatcgggcggtgatgaacgtgatgtgcctgcgccgctataccatggagctgcggctgggggggattcaggaggcgtggcgcgcgcgtaatctgcgctttaccgccagccgggatcttatcagcgtcgccaactttagcgccagagagacggaagagcaggtgggcgcctggcttgacggcttacagggcaggccgttgcccaccgccttcctggtgggcggcgattttatggccgccggcaccgtcagcgcattgcaaaagcgtggcctgcgggtgccgcaggatgtctcggtgatgagcattgacggatttaatctggcggcgattcaggaggtgccgctgaccgcggtgcatgtgccgcgggatgagctgggcagcgaggcggtgcatctcctgcagcagcgcctgctgcgcccggaggcgccgcacggctcgctactgctgcatggcacgctggtggtacgcgattcggtacggcggatccggccgggcaaaggccataccgccgtcgagccgcaggggctgtatgacgattagaccggcatacccagcgcccgtttgccgtggatattcagatcctccagggtgaagcgcccctgccagctggcttcatagtcctcgcgcgggaaatcccccggcgaggcgcctttttccagggcgatttttactttctgcgcgtaggcgaggttcttctcgcacatcggcgcggccggaatgtacatcacatttccccagccctgctgattttccaccggcgccaccgagtgaatgatgtcgcagtgccaccagacggagtccccggcattcagcgctggaatcgagcttaacgctttaattaagagcgggtgccactgctcagagatcggcagcactctgcccggcgcgacgccgcacagctcatcttccggcacatcgtcgagcagggggcgcagtagcacataagccatcgcctccgggatcggcaccacgtgcagcagcccctgacccgggatcatgtccgacagcgcggtccagccctggaaggtgcggaacaccgagcatttggtggtgttgtcgacggtatactcttccacttcggtacggtgcgcggcgtcccacgggtcgtaggcgtcgatattgccattaaaaacgttggcgaaaacctgctgataggcgggaagcagccagcgctccagcgcgccggaatcggtatgcgcccccagccccttcgaagtggttcccggcgggcggcggcggatgcggtcgggatagattacgctgacgtccggatcgaaccagcgtttgccattctgttcaaaacgccacaggcggttgaggaaagattgcactgccgccatttcatcgctctgccgcgcctgcatttgcgagggcgaccagtagatcgggtagatctccgggcgcgaagcctccagcgaaccgaagaagctgtcgccaggccctttgtaaacatcgtcgaaatggttgcgatccagatattccagcatcgcggtatcccacgccagcgcctgttcgcgtgggaagtggcctttaatcaccgcgcagccccggcgcttaatggccgcgcgctgctcatcgctcactgttccttcggcgatatcgcggaacggaacggttggccaaacctcctggcctgcggctttcagtgtctcaatctcctgcagccgctcgctgatgcgcgctgagagcttatcgaacaccgcctggacgtcgccaatttgcgcccgcagggcctgtttcatctggcgaatcgccgctttgtgatcggcgggaagtgtttcgtgggtcgggagagcagccataataacctcgctgtatctttcattcgaaagtataaaatcttacaaacgttaatttaagttaaaatggagttaatgcaagtttaaaatattgctgcggcgcacaaaatggaaaaccggggtgcgatgccccggcgaagggtcaggcgttgaagggcggggtgttatcgaggacggcctggataacgttcagcgcgccgtcatggttattatcgtcggtagcgtagccggcgatggccttgatgctgtcggcagcgttacccatggcgaaagcgtatttcaccagcttcagcatttcggcgtcattgccgctgtcgccgatggcgacgcattgctgcggcgaaagatcccagcgcttgagcaaacggctgatgccgttggctttatgcaggccagggataatcaaatcgacaaagccaaagccgctggtgaccggcttcatgatgccgtcgagcgacacgtgcagtttatcaatcagttgtgggatctcgctgtccggcaggttgagagagaatttaaacagcgtatcgtcgatggcgtgatagtcgctcacccgctgtaggcgatggtagtgcttcgacatcagctcaacaaaggcgtccggagctttatcgctgacgtaggcgctctgcaggccgcaggcgacaaagttgagctgcggatctttgagcaattcgccaatcaccacttgtgattcgtggcgggtcagttcgccgtggaacagctgcttgccatgttcataaaccagagcgccgttttctgcgacgaatgaaatctgctcgcgaatttccgggaaaaatgagatcagctgatagtactggttgccgctggcgacaacgaattcaataccttgctgcctgagctgcgcaaactgggcgaggaaacgcgggcggtcgtactgcttggcgtcattgagaaaagttccgtccatatcggtgacgataactttaacggtcataagagagtgctcctggcttaacttcgaccagtaacattctaattacaatgtgatgaggagcacaaatttatttcgaatgaaagttcacgcattcagaaaatgccggaagggcatgtcttttccggcctgcagaacagggttggcccgctaagcatagcgccagcgggcacgaaggattacagcgtatgttcggtacgggcgatgatatcgtcctgggtatccggcgacagggcggtgaagaacgccgagtatccagcgacgcggaccactaaatcgcggtactggtcaggatgtttcttggcttccagcagcgtgtcgcgcgacacgatgttgtactggatatgccagcctttgtgcacctcgaagaaagtgcgcagcagcaccatcagcttctgcttatcggactcgttctccagcgttgacggattcagcttctgattaagcagcacgccgccgaggatcgccccggtcggcagcttgcccaccgaactgataaccgccgtcggccccagatgatcggtaccggaggccgggctggccccctccgccagcggggtatgcgctttacggccatccggcgtcgccatggtctgcgcgccgaacgggacgttagcggaaatagaggaggtgccagcgtaataattgccgccaatcgggccgcggccatagcgcgggttgtgatactgcttcagctcgtcgatataggtctggtaggcccgcgccagcagttggtcgacgctgtcatcatcgttaccatacttcggcgcgccgttgatcaaccgctggcgcagctgctcgtgggtcagaccgtcgaaatcttccgccagcgccttcgccagctcctgctggccgatggcgccctgatcgaagaccagttttttcaccgccgcgaggctgttgccgaggttggcgatacccacctgcaggccggaaacccagtcatacttcgcgccgccttgcttaatgcttttcgcccgttcgatgcaatcatcgaccagcgccgagcagagaatatcgtggacgttctcttccagcatggtatcgaccacgtactcaatctcgatggatttacgggtgtagtaacgaatctggcggtcccagtcggccagcacctgatcgaagttagcgaagttgcctttcgacagggcgtgctcctgcggcaggaacacctgaccgctggtggcatcgcggccgccttccagcgtcgccagcatcacccgcgcgaagttaataaagctcatgccggtacagcggtagccccacttaccgccgaccgcggtttcaatacagccgatagccgcgtaatcgtaggcgtcctgcggctcaatgcccagcttaatgaattccgggatgacgatttcatcgttgttaaacgccggcatgccgaaaccgcagcggatcacctggacgcaggcgtcgaggaagtcgttgctcatcccggcgtggtagcgcacgctgaggttcggctgggtagaacgcaggcgaccgcaggattcgaggattgcatacgatagcgggttgaccgcgtcctgcggcttaccatccaccagattctggccgccgatggtgacgttctggtatagcgggctgccggcagaggctttggagtgcgagccggaacggatcttattgacctccagcagcttcagccagcagctgtgcagcagctcaatggcctgttcgcgatccagcgactgttgcaactcaacgtcgcggcggtagtacgggtagaggtactggtccatacggccgaaggataccgaatggccattggattcaatctgcaggataagctgaatgaagtagcacagctgcagcgcctgccagaaggttttcggcggctcatgggcgatgacgtcgcagttttcggcaatcgtcagcagttcgtggcggcgtgattcgcgggattctgctgtcgccatctcgcgcgccagcgcggcgaagcgtttgctgtgatcgctgaccgcttccagcacgatatcaatcgctttcaggaactgctcgccgtgcaggtcttccagtaccgtcaaattgatacgcgagcggcgttcggcgactttcgcacgcatcccgtcgagccctttctccagcagcagggggtagttgaccgcgaggtgagcatccccggaggtcatattgccttccgccttaataatgccggtggcgagcagcgccttttgctcatcggtgaacataccgtaacagcggtcttgtacggtctggccgcgccaccatgggcacacttcatgcaatacgcgtttattctcctcgctgaccgagaagccggcgccggggcggtcggcgagatcgtcgatctctttctcaatccagctgacggtgtattccgggaaaataggcgcggcgcgtacttcgctggcctggttaccgacgatcagctcatcgtgcttgatccagatggtgcgctccgccaggtggtgagccagcgccagcgcgcggcgcaccgggatcggtttatcgagatgccgctgatacatctccgtatagtggcgggcgcgctcggtacagaccggcggcttgacgatatgcaccagcgccattttatgggcctggatacgggcgctgagggtgttgagcttcagggtagtcatagggttatcctcgtaatatcgccgttagccccttgctttgcgcataatcctgcgcgaagacgagcagctcaggagcgtccagcggtttgtccggtgcggtgtagggctgactgagtaactggtatttgttcattcccagcgtgtggtacggcaggtaatggatctcgctgacctgcaggcgatcggcggcaaaatcggtgatcgcggcaatgtcggcttcgctggcgttgaatccctggatcaacggcacgcgaataatcatttttttccccgcctgcgccagacgctgcaggttatccagcacccggcgggcgctgccgtcggtccactgctgaaaaacggcctcgtcaacatgcttcagatcggcgagaaacaggtcgacaaagggtaaagacggttcaatgtatttccacggcacgtgcaggcaggtttccacggcggtgtgaatgcctgcctgatgactggcttcgaacagcgcttgcgccagcgttgggttcataaagggttcgccgccggaaagagtgatgccgccgccgctgcgatcgtagaatggtttatcacgcagcaccgtcgccatgatctcctcgacgctcttctcctcgccgcacaccgtgagcgcggtggtggggcagcagtcgcgcagcgcggcgatatggctgtcgttaacgttttgccggtgaatgatcaggccatcgagggtgcgggtgataaccgccggcgccgcctgctggcacagctcgcagccggccaggcacagccgcgagtcatacagcagatcttcgctacgggcgcggctctccgggttctggcaccagcggcagcccagcgagcagcctttcaggaagacgacggtgcggatccctgggccgtcatgggtggaatagcgctggatgttgaagatcatggcttatcctctcgtttgcgtatgaatataaaaacactttcgaatgaaagttaagttgacgcaaatcaacaagcgggatggggataagtcagagaggagaaaataacgagagcggtcacaaaaccaccggcgactctcgtcgccggtgtgagggtcagtgcgagccgcatacctcgcactgcgggtgacgcatcagcctcatttcgcgaaactggcaggtcatggcatcgtagatgacgatttttccgctggcaggggtgccgtagccgctcagcagcttaatcgcctccatcgcctgcagcgaaccgatggtgcccaccagcggggccattaccccggcttcgacgcaggtgagggcattttcgccgaacagacggctcaggcagcggtagcagggttcgccatcctgataggtaaagacgctgatttgcccctccatacggatcgccgctccggagaccagtggggttttgtgctgaaagcagccgacgttaagctggttgcgaatggcgacgttgtcggtgcagtcgagcaccagatcgtgatcggcaatctgcgccgccagcgcggtctcatccagcaaggcattgagcgggaccagacggacgtgcgggttaatgcgcgccagcgcctcgcgggcggaatccaccttcggctggccgagggtggcgtcgctgtgcagcgtctggcgctgcaggttggagagcgagacagtgtcgaaatcgagcagggtgagctgcccgaccccggcggcggccagatactgcgcggcggcgcagccgagcccgccgaggccgaccaccagcacgcgagcggcttttaaccgctcctggccgtcaaaatcaaaaccgcgcaagacgatctgccggttatagcgcagcatctcttcatcgctcagctcaacggtcattacagccccccaaacaggtgactgaagggttcgacctcgacccattcacctgcttcaacatggccgcgctcacgctccagcacgataaagcagttgccgaggctgaaggagctgaaaatgtgcgagccctgatggccggtggtgttcaccaccagttcgccgtccgggttgcgctgcagaataccgcgctgaaaatcgaggcggccaggcgactttttcaggcgcgtggcggcgcggacccgcaggcggggcgcctgaagcgggccgtgcttgcccgagagtttcgccagcaggggttgcaccagctgacagaaggtgacggtggcggacaccgggttacccggcaggccgcagaaccagctgctgctgagcttgccgaaggcgaagggtttccccggcttaatcgccagcttccagaagccgatctcccccagctcttcgaggatagttttggtgtaatcggcttcacccaccgagacgccgccggagctaatgaccacatcggcctgctggtcggcgtcgataaaagcgtcacgcagcttcgccgggtcgtcaggaataatgccgaggttaatgacctcgtagcccaactgctgcagcatcaggtgcactgccaggcggttggtatcgtaaatctggccgtcgccgagcggttgacccggcagctgcagctcatcgccggttgagaagaccgcgacgcgtaccttgcgcaccacctcgacctcggcaatgccgagcgaggccagcaccggcagctcggccaccgtcaggggtgtccccgccgggaagaccaccgcgccgtgggcaatatcttctccgcggcggcgaatatgctgcccggcttttaccggcgcgataaagcgcacgccggcctcggtctgttcagtctcttcctgcatcaccaccgcatcgcagccttccggcaccggcgcgccggtcatgatgcggatacaggtgcccgacggccaggcgtcgttgaaaggctggccggcgaaggccttaccggcgaccggcagcgccgcgccgtcgcgaaggtcgttcagccggacggcatagccatccatcgccgcgttatcaaagccgggcacatccagcggggagacgatgtcatgggcggtcacacgcgagatggcctgcaacagcggtacagtttccgtcgcgttcagcggcgtaatacgatcgagcatctgggcgagggctgtgtcgagcggcatcagtccggcggtaaaatccatgggtcactcctgcgggcaaaacagcgaaaacgcctattatggcagaaaagcggcgcgggctgtatgccacctgggtacgaggctttacatcgcccgccgctctttctatattcaaaaattgtataagacattcagcaatataatgatatcaatacccttattcatgacgtgaccggcgccgcgccgcggtacgacagggcaggggcgatccacttcatcgttaaggactggcgaaatgggcaaggcggttatagcaattcacggcggcgcaggggcgatttctcgcgcgcaaatgacgccggagcgggagcgagagtatgtggcggcgctgtcgactatcgtcgaaagcgggcagaaaatgttggccgcgggcgccagcgcgctggatgccgtggccgaggccgttcggctgctggaggagtgtccgttgttcaacgccggaatgggcgcggtatttacccgcgatcaaacccacgagctggacgcctgcgtaatggacggctacagcctgcaggctggcgcggtagccggggtcaaacatttgcgtaatccggtgctggcggcgcgtctggtgctggagaagagtccgcacgtattactgatcggcgagggggcggaaaattttgccatctcccacgggatggcgcgcgtggataacgatctcttttccactcctgaaaggctgctgcagctgcaggaggcgaaagcgggcggggagattatcctcgaccaccacgccgctcccctcgacgaacgccagaaaatgggcaccgtcggcgcggtggcgctcgatctggccggcaatctggcggcggcgacctccaccggcggcatgaccaacaaactgcccggacgcgtcggcgacagcccgctgccgggcgcggggtgttatgccaataatgccagcgtggcggtctcctgtaccggcaccggcgaagtctttatgcgcaccctggcggcctacgatatcgccgccctgatggagtatgggcagctcagtctctattccgcctgcgagcgggtggtgatggagaaactgccggctctcggcggcagcggcgggctgatagccgtcgatcgcgaaggcaacgtcgttttaccgtttaacagtgaaggcatgtaccgcgcctggtgctatgccggcgatacgccgaccattggcatttatcgcgaatagaacaagggagagggcgagtgtcgcaaactcacgaaaccgatacctgcgaagtgctggtggtgcgcaacctgaacgtggcgttccgccagcaggatgcgccggaggtgcaggccgtgcgtcagctttccttcagcctgcgccgcggcgagacgctggcgatagtgggtgagtccggttcgggaaaatcggtgaccgcgctggcgctgatgcgtctgctagacgcggccagcagcgaggtgaacagcgaggggctgtggttgcggcggcgtaaccggcaggtgatcgcgctcaatgagcaaacggacgctgagatgcgccgggtgcgcggcgcggatctggccatgatttttcaggagccgatgacctcgctgaatccggtttttaccatcggcgagcagattgccgaatccctgcgcctgcaccaggggctggggcgcgaagaggcgctgcgcgcggcgaaaaagatgctcgatcaggtgcgtattccccaggcggaagagatgctctcgcgctatccgcaccagctctccggcggcatgcgccagagggtgatgatcgccatggcgctctcctgtcggccggcggtgttgatagccgatgagccaaccacggcgctggatgtcaccatccaggcgcaaattctgcaactcattgccgttctgcaaaaggagatggcgatgggggtgatctttatcacccacgatatgggcgtcgtggccgatatcgccgatcgggtgctggtgatgtatcgcggtgaggcggtagagaccggcagcgttgaggagatctttcgttcgccgcagcacccgtatacgcagtcgctgctggcggcggtcccgcggctgggggagatgcgtggccaggatctgccgcgccgttttccgctgccgggccagccgctggcggagagcgaaacgcccgatacggtagtcgccggcgagccgatcctgcaggtgcgtgacctggtggcccgttttccggtgcgcggcgggctgctcaatcgcgtgacgcgcgaagtacatgcggtggagaaggtcagttttgatctctggccgggagagaccctgtcgctggtgggcgagtccggctgcggcaagtcgaccaccggccgggcgctgctgaggctggtagagacccagggaggcaccattaccttcgacggtcagcggatcgataccctcgccggcggcaagctgcaggctctgcggcgcaatattcagtttatttttcaggatccttacgcctcgcttgatccgcgtcagacggtcggcgattcgattatggagccgctgcgggtgcatggcctgctgcgtggggaagcagcgcgtgagcgggtcgcctggctgctgaagcgcgtggggttgcagccggagcatgcctggcgctatccccatgccttttccggcggccagcggcagcggatctgcattgcccgcgcgctggcgctgaatccgaaggtggtgatagccgacgagtcggtgtcggccctggatgtctccattcgggcgcagattatcaatctgatgctcgacctgcagcgcgagatgggcatcgcgtttctgtttatttcccatgatatggcggtggtggagcgcatcagccaccgcgtggcggtgatgtatcgcggtcgcattgtcgaaataggcccgcgccgcgcggtgtttgaaaacccgcagcacccctatacccgtaagctcatggccgccgtaccggtggccgacccgggccaccgtcatccgcagcgggtcctgctgtctgatgacgtcccgggcaatatttataagcggggcgaggagatcgccagcgtgccgttgcagcaggtcgggccgggccacttcgtcgcccgcgaatccgccgatgtgctgggcagaacataacaacacataacgcatcttttcaggagaacacgatgacacaacctgtttcacgcaaatggtggctggcgctgagtatcgcggcagccctggcgagcgctcccgcctttgccgccaaagatgtggtggtggcggtcgggtctaacttcacgaccctcgacccctatgatgccaacgataccctgtcgcaggcggtggcgaagtccttttatcaaggcctgttcggccttgataaagagatgaagctgcaaaacgttcttgctgagagctataccgtgtcaccggacggcctggtgtacaccgttaagctgcacagcggggtgaaattccaggatggcactgactttaacgccgaggcggtaaaggctaacctcgatcgcgcgagtaacccggataaccatctcaagcgctataacctgtataaaaatatcgccagcaccgaggcggtcgatccgactacggtcaaaattaccctgaagcagcccttctcggcgtttattaacattctcgcccatccggcgacagcgatgatttcgccggcggcgctgaaaaaatatggtaaggatatcggcttccacccggtgggcaccgggccgtataagctcgacacctggaaccagacggattttgtgaaggtcagcaagttcgatgggtactggcagccggggctgccaaagctggattctatcacctggcgtccggtggtggataacaatacccgggcggcgatgctgcagaccggcgaggcgcagttcgccttcccgatcccttacgaacaggcgccgctgctggcgaaaaacagcaaactggagctggtggccagcccgtcaatcatgcagcgctacatcagcatgaacgtgacgcagaagccgttcgataatccgaaggtacgggaagccatcaactatgcgattaaccgtcaggcgctggtgaaggtagcgttcgccggctacgccaccccggcgaccggagtggtgccgccgtcgatcgcctatgcccagacctacaccgcctggccatacgatccggcgaaagcgcgccagctgctgaaagaggcgggctaccctaacggtttcagcaccacgctgtggtcatcacataatcacagcaccgcgcagaaagtactgcagttcacccagcagcagctggcgcaggtggggattaaggcgcaggtgacggcgatggacgctggtcagcgggcggcggaagtggaaggtaaagggcagaaagagagcggggtacggatgttctataccggctggtccgcctccaccggtgaagccgactgggcgctgtcgccgctgttcgcctcgcaaaactggccgccgacgctgtttaataccgcgttttacagcaacccgcaggtggataacgcgctgagcgaggcgctgaaaaccaccgatccgcaacagaaaaccaaactctataaagaggcgcaggatattatctggaaagagtcgccgtgggtgccgctggtggtcgagaaactggtctccgcccacagcaagaacctcaccggtttctatatccagccggataccggctttagcttcgaacaggcggacctgacgccgtgatcatgttcatcttcatgcgtcctctctcccggaatgggagggagcgatgctgaattatgtgattaagcgcctgctgggcctgatccctactctgcttatcgtcgcggtgctggtgtttctgttcgtccatatgctgcccggtgacccggcgcggctgattgccggacctgaggccgatgcccaggtggtggcgatggtgcgccagcagctggggcttgaccagccgctgcatgtccagttctggcactacatcaccaacgtgctgcgcggcgattttggcatttccatggcctcgcggcgtcccgttgccagtgagattgccagtcgctttatgcccacgctgtggctgacgctggccagcatgagctgggcggtactgttcgggatggcggcggggattgcggccgcggtgtggcgcaatcgctggcccgaccgtctgggaatggcgctggcggtgagcggtatttcgtttccggcttttgcccttggtatgctgctgatgcaggtgttttcggttgagctgggctggctgccgacggtgggggccgacagctggcggcactatattttgccgtcgttgacccttggcgcggcggtggcggcggtcatggcgcgctttacccgcgcgtcattcgtcgatgtgctgcatgaagactatatgcgtaccgcccgggcgaagggggtgagcgaaacgcgggtggtgctcaagcatggtctgcgcaatgcgatgatcccggtggtgaccatgatggggctgcagttcggctttctgctcggcgggtcgatcgttgtggagaaggtgtttaactggccggggcttgggcgcttgctggtcgattcggtggagatgcgcgattacccggtgattcaggcggaagtgctgctcttttcgctggagtttattcttatcaatttagtggtggatgtgctgtacgcggccataaacccggctatcaggtataagtaaggtgcgattgcttaactggagaaggcaggcggcgctgaacgccatgccgggcatcagacccggcgagatccataccccctggcatgagttctggcggcgctttcgtcgccagccggtggcgatgggcgctggtattttcgtgctgttgctgattgcggtagccatcgttgccccatggatagcgccgtacgatgcggaaaattatttcgactacgaccgtctgaacgaggggccttcgctggtgcactggttcggagtcgactccctgggacgggatattttcagccgggtgctggtcggggcgcagatctcgctggccgccggggtgctggcggtgctgattggcgcggccatcggcacggtgcttggtctgctggctggctactatgagggctggtgggaccggctcattatgcgactttgcgacgtgttgttcgcctttccggggatcctgctggcgatcgcggtggtcgccgtcatgggcagcgggatggccaacgtgatcatcgccgtggcgatcttctcgatcccggcgtttgctcgtctggtgcgcggcaatacgctggttctgaagcagcagacctttattgaatcggcgcgcagcatcggcgccagcgacgccaccattctgttcaaccatattctgccggggacggtgtcatcgatcgtggtttatttcaccatgcgcattggggtatcgattatttcggcggccagtctgtcgtttctcggcctcggcgcgcagccgcccaccccggagtggggcgcgatgctcaacgaagcgcgggcggatatggtgatgtctccgcacgtggcgctctttccggcggtggcgattttcgtgaccgtactggcgtttaatctgctgggagatggcctgcgcgatgcgctggatccgaagttaaaggggtaggatgagggaaagctccgccgggagtcctttatgttatctgcggcttcagcgcacattgcgcttccggttaattttctgcgttaggtctctcatggcgcagggagcggtgtgaggcggaaacgaccgccggacggttccctctcctcccgggagagggccagggtgaggcgaagcatcgctggaaagtcctttatgttatctgtggcttctgcgtagtttgcgctcccggttaatcgtctgcgttatgtctcttatggcgcagcaaaataacggcgcaacagggctgcctggaaggtaatcaatgcttgcccgtggcgctgcgcttgcgcgggcctggggggatgagcctacgggaggaccccgtaggccgtggaatgcgctaagccgctatccgggaagctggactagacccgggtaccccacaggtcgtattcgtcggcgtgctcgactttcacccgcaccacgtcgcccggcttaacgcgggtttcgccgttcaggtacaccgcgccgtcgatttccggagcgtcggccatgctgcggccaatggcgccttcttcatcaacttcatctaccagcaccaggatttcgcgccccactttctcctgcagacgctcggcagagatctgctgctgcagctgcataaagcggttccagcgctcttctttcacctcttccggcacctggtccgccagctcgttggcggtagcgccttcaaccgggctgtacttgaagcagccgacgcggtcgagacgcgcctctttcaggaagtcgagcagcatctggaaatcttcttccgtttcgcccgggaagcccacaataaaagtggagcgcagggtcagatccgggcaaatttcacgccactgcttaatgcgcgccagctgacggtccgcagaacctggacgcttcatcagcttcagaatacgcgggctggcgtgctgcagcggaatatcgaggtacggcagaatcttgccttccgccatcagcgggatcacatcgtcaacgtgcgggtacggatagacatagtgcaggcgcacccagatgccgagcttcgccagctcttcgcacagactgaccatgctggtcttcaccggcataccgttgtggaagccggtgcggtgcttgacgtcgacgccgtaggcggaggtgtcctgcgaaatcaccagcagctctttcacgccggcgtcagcgaggcgtttggcttcggccagcacttcgccaatcggacggctcaccagatcgccacgcatggacgggatgatgcagaaggtgcagcgatggttgcagccttcagagatttttaagtaggcgtagtggcgcggcgtcagcttaaccccctgttccggcaccaggctcaggaacgggttgtgcttcggcttcggcgtataatggtggacatgctccagcacctgctcatagctgtgcggaccggtgatctccagcaccttcggatgcacttcgcggatctgatcctctttcgcgccgagacagccggtgacgattaccttgccgttctctttcaacgcttcgccgatcgcttccagcgattcctgcacagcgctatcaataaagccgcaggtgttaacgatcaccatatcggcgttgtcgtaggtcggtacgacgtcataaccttcggtgcgcagttcggtcaggatacgctctgagtccacgaggtttttcgggcagcccagggagacgaagccgattttcggctgatgcgtgacattgctcatagcttaaaaagtgttcaattattggaatggtcagggcaggaattctacagatctttgcgaaaaagagtatagctccgtcgcggttaatggtgaaaaagcgcccccgacctgtcttttacgccccccaccgccagagcggatcccacacgccccggagcagaggggcgggacacgcttctgacaagccgtgcgcacaggcggctcaagcccggcgtggctgccgggcagagacttattgcgccgggttaatggctgcggagggcgtggcgccggtttttttcggctcgcgcttatcctgcagcgtgaaaatagagatcagggtaaagagcccggcgacgctgccgagaatcagataggtgttggcgaagccaatggtatcgtacagatagcctgccagcggagagtaaatggcggtggcgatcgaggcgacgaacagcaccagcaaatagacagtcgaagagagcttgtggtcgaagttggcggcgatgaatttaaagaccgataccagaatcaacggcttctccagagcatgcatcattttcaccgcaccaatccacaccgggccgaggggcacggctgagccgacaatacgtaccgacatgatcagcccggcgatgatcagcgcccatttggcgccggtccggttaacaaaccatggcatcaggcagaggaacagggtttcaccgcagacctgaatagacgcgaggatcccgtaccagcggttgccttcctccggcgtcgggaactgtagcgagaagtactgggcaaactgctgatcgtaggtgtcgtaaatctgcgtgacgaacagggtaaagagcagcagcatccagaactgaccattcttcgccagctcaagggcatgagagaccttcagcgattcgcttcgcgccacatcggcgtcggttaattcaattttggttagcataaagcagatggcggcgatgacaatggcgaggctggcgagccagaaggccagattaggattgctgtcgatatatttacccacaatccaggccgccgctgcccagcctaacgagccccacatccgcacacgaccatattcgaactgatagcgccgggaaatcttatcgatataagagtcgattactccgcagccggagttaaagatgatccccagatagatccctcccagcaaggcgccaaaccaaaagttgtgcaccagcagcggcgcgtaaacgtagataaagaaggggcccaccggcaggagcagggcgaccagcagccagataagccgttttttcaggccgaacttgtcagagataaagccgaagaaaggctgcatcagcagggcgataaaggcgttgaccgagtaaagcagcccggtcttcgtggcgctgatgccaagatgctgggtggtccagataacgaagaaagccatggtcgacgaccaggcgaacaggtagaggaaatcgaaaagactcaacagaaggtagtttcttttaccggacgtcatgtttcagttccttgcaaatgggcagagagaatttcagcgatccgcgggccgcgttcgctgttttcttgacatgttatacgtattacattaattatttgttatgacatcctaattgacgatggtgcaacaggtcatatgaggtattgtgatcattgctgcactaattttgtctcttattgccattttctgtttattaatttcagcttgaaattaattgtgatcgtataacattgtttttgttatacaccctacaatgcgttaaagttgccacattgtaaatgatgttaaagaactggggattattgacctggcgcatcattttgcacaaaaaataaccgtattatggaaagggtaaaggacgacagaggaggaaccgtgatgaccgttgacagactataccgccaccttctgcagaagcttattaacgccaatatcgatattgacgcctatctgcaactgcgaaaggccaaaggctacatgtcagtcagcgaaaatgaccatctgcgtgataacttgtttgagctttgccgtgaaatgcgtgcgcaggcgccgcgcctgcagaatgccatttcaccggaggagagggatgtccttcgcctggccggcgaatcggtcgccgccgctgcactatgcctgatgagcgggcatcatgattgtccgctatacatcgctgttaacgtagagaagctagaacgctgtctgacaggattgacctcaaatattcataaattgaataaattggcgccaatcactcatgcctgatcggctgaaacccaggggaagtgaacgcttcccctgttaaaggttatgtaaaaatccccgcgcaaatttccccgctggctaccctttagcccagagctgacgaaaggagaatgccatgcgtccgatcccactgctgttgatattgagcgccttagcgctaccagccctgagccaggccgcggtgcgggtggaggtattgcaaaaccggctggcccagccgtggggcatggcctttctgcctgacgatcagggcatactgatcaccctgcgcggcggcgagctcaagcgctggcagccgggcaaaggtctgtcggcgccgatagccggcgtgccgcaggtatgggccaacggccagggtggcctactggacgtggcgctggccccggatttcgcccagtcgcggcgggtgtggctgagctatgcggaaagcgacgccagcggtaaggcgggcaccgcggtgggctatgggcggttgagcgaggatgccacgcagctgacgaactttaccgtggtctttcgccagcagccgaagctctccgtcggcaatcattttggcggcaggctggtgttcgacggcaaaggatatttgtttatcgggctgggcgaaaataatcagcgcgccaccgcccaggatctcagcaagctgcaggggaaagtggtccgcctgacggagaccggaggtgtaccgccggataacccttttgtcggccgggctgacgccaggccggagatctgggcttacggcatccgtaatccgcagggcatggcgatgaatccctggagcgaggcgctgtggctgaacgagcatggcccgcgcggcggagatgaaattaatattccgcaggcggggaaaaattacggctggccgctggcgacgcacggtattaactacagcggcctgcccattccggaagcaaaaggcaaaacggttccggggaccgaacctcccctgtatgtctggccggtctctcccggggtgagcgggatggccttttattcggcgccgacctttccccagtggcagcataagctgtttatcggcgcgctgaaggagacatcgctgattgtcctggcggtggacggtaatcaggtccgcgaggaggggagattactggaggcgcgcggaaaacgcatccgcgatgttcgcgtgggacccgacggctatctgtacgttttaaccgacgagtctaacggcgagctattgcggttgagtcccgaggcttagcctcaggtcaccgggatctgcactacttcgcgccaggcaggacgttggctaatctgctgataccagcgctgcagatggggccgcggttgccagctgtcgaggatcgacaacagattgtagacgaagggagcgacggcaatatcgccaaggccgaactgctcgccggagagccacggcattttggccagttcgtcatccagcatggcgaacagcgcttcgcaggcgctgatccccgcggcgatggccgccgggtcgcgctgctccggtggcgttctcaccaggcccattaataccgggcgatgggcgggagagagggtgccgttggaccaatccatccacttttccccttgcgcgcgctgcgccggcgcggccagccacagacggtcaacgccatactgggccgccaggtagcgaataatcgtatttgattcccacaataccaccccggtggcatcgtcctttaacagcggcaccagcccgttcgggttcatcgccagatattccgggtcatgattgagaccaaactccagcccggcgaggatctgctgataaggcagatccagctcctccagcacccagcgtactttcttcacgttggtcgagttattacgtccccacagtgtaatcattttcgctcctgagtttgtttcactgccgttgcagcgcgatcggcgatcatgttgggataaagttaaaaatccggcaagcttttttatttggctgttattaaaggtttttatgcttactcccttcagccaggggcactcctgggtcacagggcccggaaagtgtttttactattttacaggagtaatatctatagggtgttacgctacgaaggaaagggcgtgattatggtgtatcttattgataattaaagttttaaatcatgcacgcatctataaaaacgctccctctccgtctcggttaaaatctcaatgtcgcctgagggtataatttgatgctgattattgcatcgcaatcatctgaggaacacaggttaatattaataaatagaaagttactgaaagaattatatttttacagggatgaactgttgtttttatcgatcggatatacatctttttcatcccacccagaaaaaatagaccatgagaggcgccaactggctgaagatattctgaaaaatagcaaaaaaaacccagtgcctggcactggggagtaaatttactcagggttgcatgctgttctcaagataatattcgagtctcgaagtatgggttaaccaaaggtaaccatcaacttccatacagactacatgggaaatatactgtattaaataaccaggaatccacccttacttttgtgctatttatcttacctgggtaatcactgcgggggtaagtggtatataatgcaataatcagtatttgaatctatagcgttaaacgagcagagcctggtagaggactttactttccccggaaggatttgaaaaaggcggttaaaatgaatgactgataaggatggccagcatactatcgcggtgctatcaaaacatccctgcaaaacgaaatagggataaaagaagcactggcgaactgcagtctggaagagcaagtcgtagagctcgatatggcatcggacgagaagggtaggagattacccgggaagagatgttaaccttttcatcaaaccggcgtgattaataacgggcaacagaatcagagcggcccgggattttgagagcaatacttctgtaaaggccacggctgtggatgcgctgttatgaatgtatttgtaaaatttatcaccatccagagtcgccttgaaaaaaaaagcccagcgacaggctggggtgtaattacacgcataaagggatatgccattttcaacacaatatgcgaatcttaatttatggaataactgcgggtgagctacccgcttccataaagattgcaggggaaactatactgtatttaatgaccaggaatccatccttatcgatgtgctatttttcttacttgtgtaatacggaaagggaaaatagcccgataaactgtcttttaccgatatgccgactaaaacaggaaagccgtctgcctgcttatccagtgggcgaataattcatatcattagcgggaggctatctcttcctgacctcaattcctgatggtggcgtatagggggatagctgattgatatgctttatcaaggatattgcgcctccatcggcggaatgctatggcaatcgaagccctgctgaacatggcgatcgggcagacccgatggagagaagagtgcgggcgttgttgctaatttcctgagacgggcgtaatgaccgtctcaagcatagcccgggagttctcaactgcatttcaggcgtaaatagggcctacagaaccttcaggtttatatttaagcgtctgagacttctacagcagcaagccagatgtggttattgtgagttcggaagttgaactgggcctcatggaatgcaaccgggccgacattttgagttttgtgaagggtatcagcagtaacaaccatccccggttctcaggtgaagggggtaggggcgaggcgactggatatcactggccaggctttcgcttaccccacacggccccgccataatgtgaatctatgaccaggcaaaccacgatgaaagacacgcttgcgacctctctttagtagcatttttcccgaagagaagtgagctatgtcattgaaatttcggtgactaattggttttgaaaggcgatttttttcttgccataataaagttaacattaaggcgattacgatcaaaaaaattgttctgattaaagcacagcggcatgttattgcgtaaactttaaaaactttaccaactcgctgtttctttaaggtcatttgtacgctttactcaccggttgctgcggcgcggtcagagtggcgcggcatattttgtttggaaaggatacttgggtggctcttatgatgcatgacgctttttcccttcgcggcctcgcggcaggttgcgcgctgttatttcttgtcgcacctgcggtgcaggctgcggaacaactccccgacgccccttcaattgacgctcgcgcctggatcctgatggactatgccagcgggaaggtgctcagcgaaggcaatgccgatgaaaaactcgacccggccagtctgacgaagatcatgaccagctacgtggtagggcaggcaataaaagcgggaaaaatcaaactgaccgatatggtgaccgttgggcgcgatgcctgggcgaccggcaacccggcgctgcgcggctcatcggtgatgttcctcaagcctggcatgcaggtttccgtagaagatctgaacaaaggggtcatcattcagtccggtaacgacgccagcattgcgattgctgactacgtagcgggcagccaggacgctttcgttagcctgatgaacggctacgccaaaaaaatggggctgaccaacaccacctttatgaccgtccacggccttgacgcgccggggcagttcagcaccgcccgcgatatggcgctgctgaccaaagcgatgatccacgacgtaccggaagagtatgcggtacataaagagaaagagttcactttcaataaaattcgccagccgaaccgcaaccgcctgctgtggagcagcaacctcaacgccgatggcgtgaaaaccgggaccaccgccggggccggctataacctcgtctcctcggccactcagggtgatatgcgtttgattgccgtggtgctggggaccaaaaccgaccgcattcgctttaacgagtcagaaaaactgctgacctggggcttccgcttctttgaaaccgtgacgccgattaaaccagatgccaccttcgttacccagcgcgtgtggtttggcgatagcaatgaagcgaaactgggggctggcgaggcgggctctatcactttgccgaagggccagctgaaaaacctgaaagccagctataccttaaatcagccacagcttaccgcgccgctggagaaggggcaggtggtcgggactatcgactttaagctaaatgataaaaccattgaacagcgtccgctgattgtcatggagtcggtaaaagagggcggcttcttcagccggatgatcgacttcgtgctgatgaaactgcacggctggttcggtagctggttctcctgatgcctgcccgcgccctgcggggcgcgggcagcgacgcttcaatacagtagggaaatctgctgcgccttcgccagcgcgaccagctcatcatccgggcagatatcgctggcgatcacgtcaaatttcgctaacgcccccatgcgcgccggacgcactttgccaaacttgctgtggtcgaccaccagcacgtggtagcgcgcgtgacgcatcgcccagtgcttaaccggcagctcttccaggttatagcaggtcgccccctgctcgcagtcgatccccgccgccgagtaaaaggcgatatcagggctcagatggctgagggtatcctcaaggctcagcggcataaaaatcgcgttgctggcatgaaactccccaccgcacaggaccgcgcggcactggggtttttcctgcagggccagaaaggtgttcagggagtagcagacgccggtgaagggcagggcatcgtcaatggcgtcaataatccacggcgtggtggtcccgcagtcgaagaaggccatctgatgggcctccagcagcgcggccgcatggcgagcggcacggcgtttttcctcgaccagccgggttttttgatcgctgagcagataatgggtggcgctgcgcggctccagcacaatgtatccgccgagcagcacaaccgggccgctgtggccattgaggtcgcgacgaatggtcatttccgacaccccaagcagggaagcggcttctttcagatgcagcttatcgctgcgtttaagtgcctgaatgagctgactgatacgttcgtcacggcgagtttccatattccctctgcgctaaaatcgccctgcgggggcagggcgttagcgggattttacctgtcgcttgcgggttagtcacgcggtggccgcagcgacggcggcgtttagccgcgcacccagcctttgcggattggcaaggagaagcagagacgatacagccgctgcagctgatggtatagcgccgggccgaacgtgtgccagatcagcgccgcgccaaggcagccgcacatcccggccagcagcccgccgaccatatccagcggccagtgcacgccgagatagacacgggaccaggcgatggcggcggcaatggccatcagcagggcgccggaccacaggcgatgccagaacaggaaggccagggcaaaggtaaagctgacggtgccatggtcgctggggaaggagtcgtccgccgcgtggtgcaggaagttatagcctacgccggcgacaaacggccgatcgtgcggatagaggtggccgatcgcccacgacacggtcaggctgatcgtcagcgccagcatcagcttaaacaccatctgccgctgggcaggcccccacagccacaatgtcaccaccagcagaggcacgatcagaatcagatctttagcgatgaagatcgccatctcaatggcccactgcggcgaggcaggcgtcgcgttgagcagggcgaacagcgcatagttaatattttccagcatagacttccaggctcgttggtccgatagcaattaagccgcctaccctaaataaaagcggtgcggagttaaaggcggcattgtcttaaagatcaggttgttatgaaatccactaccataaagtctacggctaacagcctgaaaaacgtcagtatatcgtttgtcacattgctgaaacataaacggaatatatacacaggctgaataacaggggagaggcaggacgatggcgcacggctcgtaatattgtgcggtgtcacccacaattcactatctccgcgccgggagtttcattacactttgcgcgatttttgatagataagagatttcatgcaaaattattcgctttcaggccgccgcctcggaaggcaggcgctgttgttcccgttatgtctggtgctgtacgaattttccacttatatcggcaacgatatgattcagccgggcatgttagccgtggtgcaggaatttcaggtgggcaacgaatgggtacctacctcaatgactgcctatctggcaggcggcatgtttttacagtggctgctggggccgctgtcggatcgtattggccgccgtccggtgatgttgaccggcgtagtatggttcatcgttacctgcctggcgacgctgctggcgcagaccattgagcagtttaccctgctgcgcttcctgcaggggatcagcctgtgctttattggcgcggtaggctatgcggcgatacaggagtcctttgaggaggcggtgtgtatcaaaatcaccgccctgatggctaacgtggcgctgattgccccgctgctggggccgctggtgggcgccgcctgggtgcatatcctgccgtgggagatgatgtttgtcctgttcgccgtgctggcggccatctcgttcttcggcctgcagcgggcgatgccggagaccgcgacgcggctgggcgaaaagctgtcggtgaaagagctgggccgcgactatcggctggtgctgaagaacctgcgcttcgtcgccggcgcgctggccaccggctttgtcagcctgccgctgctggcgtggattgcccagtcgccggtgattattatcagcggcgaacaggccaccagctatgagtacggcatgctgcaggtgccgattttcggggcgctgattgccggcaacctggtgctggcgcgcctgactgcgcgccggaccgtgcgctcgctgattatcatgggcggttggccgatcatgtttggcctgatcctctctgcggcggcgaccgtggtctcttcccacgcttatctgtggatgacggccggtctgagcttctacgccttcgggattggcctcgcgaacgccggcctggtgcgtttaaccctgttcgccagcgagatgagtaaaggcacggtctcggcggcgatgggaatgctgcagatgctgatcttcaccgtcggcatcgagctcagcaaacatgcttacgagctgggcggcaacgggctgttcagcctgtttaacctgctgggtggggtactatggctggggctgatgatttactttctgaaagataaaagcgtcggcaattcgcagcaggggtagttgttttcaacccggatgcgctcgcatccgggtcttatcaggcgaacggcgcttcgcgatccaacaccttatcaataatctgcaggacaccttcttcgttgttatgcggcgcctgatagcgggcgacggctttgacgtcttcccgggcgttggccatggcaaagccaaacccggcgtgctgcagcatttcgatatcgttgccgctgtcgccgaacgccaccacctcgtgatcctcaatgccccagcgctgctgcaaaatgcgcagcccgttggctttgtgcacacccgggataattaagtcgatgctgccgtagccggtggccaccgcggtgaccatgtcccccagcgtcgcgtgcagcttcggctgaatttccgggatcaggctgtctggcacgttgagaccaaatttgaggatggtgtcatcgagatggttaaaatcatccaccagttctaggcggtgataatacttcgccgccaccgtcttcagcgcgtcgttgtagcgattgagggtgtaggcgctgcgcttcccgcaggcgatgatttcgatattcggcaacgtctgcagatggtcgaccacggcgttgaagtggtgaaccggcagttggcagttgaagacgtcttcattgccgctcaccacccagccgccgttttccgccacgaaggcgatctgatgggcgatctccgggaaaaaggagatcagctgataatattggttgccgctggcgaccacgaagcgaatattctgttcgcgcattcgctggtactgggcgaggaagcgcggccggttataagttttggcatcgcttaaaaaggtgccgtccatatccaccgcaatcagtttgatgctcattagctgttctccataacgggttcagattgtggcttagccaccgcgcgggcgaccagcgccgccaccatcaccagacccagcaccaccatcatggcgctgcgcaggccgaagtgttcgccgaggaaacccagcagcggcggcccgacgaggaaagcgagatagccggtgatcgccaccacgctgacgcgcttgggcgcgtccggcccggtatcgctggcggcggagatggtcagcgggaagccgagcgaggcgccaatgccccacagcagcaccgagatgcccgccacccaggggttatcgacgaagatgatcaggcctatgccgagggcgcccatcactgcgctgccgcggaccaccgccacccggctgtagcgatcgataaaccagccgccggtaaagcggcccagcgtcatgccgagggtgaaaccggcataaatcagggagccggaggtggggctaaagccgtggccatccaccatcagcagcggcagccagtcgttggccgagccttcggcaaaggccatcgccaggacaatgacgccgatcagcagcagctgcgcgtcgcgccacaccggcagacctttcgcctcaccgtgggcgacttcggcggcatttttaccggtgccgtcgggaatggcgcggatagcaatggcgatgggcaggatagccaccagcgcagccgccaggatgtgcggggcggccggcagaccgaatccggtcactgccatgcccaccccggcgccgaacagggtgccaaagctgtagaagccatgcatcatcggcagcaccgttttattcatctcccgctcgatggccgcgccttcgacgttaatagcgacctctgcggagccgaagctggcgccgaagatagccagaccgaaggcgaacagcggggcggaagtgacccacagcgccaggctgagcaccagcatgccaagcacggcgaaggacatggtggtgcggatgaccttgcgggtaccaaagcgcttcaccagccacgccgagcagagaataccgctcatcgaccccaccgacagaccaaacagcaccacgcccatctctgcggtggatagcgccaacagatcgcggatcgccggcgtgcgggtggcccaggaggccattaacaagccggggatgaaaaagaacataaacagcgcccatagccgaagctgcagcgctctgcgcgaggattgcgtcgtcatccgtaaacgccttaaaggagaagagtgaagacaacagtagcaagtaagtgtacatttgtacataaaccggaagaggaaaatcatggcccgtagaccaaacgatccgcagcgccgcgagcgcatcctgcaggcgacgctggataccatcgcggcgcatggcatccatgcggtgacgcaccgtaaaatcgccacctgcgcgaatgtgccgctgggatcgctgacctactatttcagcggcattgaggcgttaattgaggaggcgttcagcctgtttaccgccgagatgtcggcgcagtatcagcaaggcttcgtcggggtaacgaaccgggaacaagcctgcgatgccatcgcggatctgatcttcagcgcccaggtgaccacggcgcgcaatatggagctgatgtaccagctgtacgcgttctgcagcagtcagccggcgctgaaggcggtgatgcagaactggatgcggcgcagccagcagacgctggagcagtggttcgcccccgataccgcccgcggtctcgacgcctttattgaagggatgaccttgcactttgtcaccgaccgcgcgccgctgtcgaaggcggcaatccgcatgatggtcgggcagctggcgggggagagggcgcaggaagaggggcgctgaagcggcgtttcacccggaatggctaaacgcaggcaacaaaaaacccatcaaccttgaaccgaagtggcggggttgatgggctccacaaaatggggacatcaaagaaaagcagtggcattacttatgactgatgccctgagaaaaagttctgcctgtgacggcttttttctcaaaaaattattgtagccctggccagatgatcacgatgagcgtcccggcaagggtaagcagcacgttggcgatggcgtaggtgcctgcgtagccgagcgcgggaatgttgctgcgcgcggtatcgctgatgatctccatcgccggggcgcaggtgcgggctcccatcatggcgccgaacagcatcgcccggttcatgcgcagcacgtaggcgccgaacaggaagcagatcaccaccggcaccaggctgacgataagccctgccgccagcatctggccgccgacggcgcccagcccgttattgatcccggccccggcgctgagaccgactccggccataaacaccatcagaccaaactctttcaccatgttcagcgccccctgcgggatatagccgaaggttgggtggttggcgcgcaggaagccaagcatgatgccggcgaacagcaggccggcggcgttgccgatgccgaagctgaaggagctgaactggaaggtgatcatgccgatcatcaggccaacgataaagaaggcgcagaaggccagcagatcggtcacctggctgtgaatggagataaagccgatgcggtcggccacggtttttacgcggcgggcgtcgccgctgacctgcagcacgtcgcctttgttcagtacgacgttatcgtcgataggcatctcgatctggctgcgaataacccggtttaagaagcagccgtggtcggtaagcttgagctgcgccaggcggcggccgacggcgttgtggtttttgaccactatctcttcagtgacgatgcgcatgtcgagcagatcgcggtcgaacacctctttaccgttgcggaagctcgggtcgaggcgggcgtgggcgtccgggtagcccaccagcgcaatatcgtcacccatctgcagcaccgcgtcgccgtccgggttggccagaatgccgttgcgacgaatgcgttcaatatagcagccggtctggcggtaaatacccagttcgcgcagatttttgccatccgcccaggccaccagctccgggccgacgcggtaggcgcggatcaccggcaggtagactttacgtttggaatcggtatcgaggccgcgctcgcgggcgatttgctgggcgctggtctgcagatcctgatgctgcagcttgggcatatagcgggcgccgacgatcaggctcaccagaccaaccagataggtcagggcatagccgaggctcagatggtcaagcgactgcgccagctgatcgctgggcaggccgaaatggcgcagggtgtcgcccgcgcccaccagcaccggggtggaggtcatggcgcctgccagcataccggcggtgagcccgatatcccagccgaacactttacccagcaccatggcgatcagcatcgcgctgccgaccatcaccagcgccagcatcaggtagtttttcccgtcgcggaaaaaaatagaaaaaaagttgggcccggcttctacgccaacgcaaaaaataaacagcataaagccgagattaagggcatcggtgttaatcgcgaaatgctgctggcctaataatagagaaacgactaaaacgccaatggaattaccaagttgtactgagccgagacgcagttttcccaggcatagtcctaatgcaagtacaacgaataataacaggatgtaattcccgtttaacaaatctgcgacgtttatattcacgaaagccaacttctcatttactagtaagttgttgaaggaaatggttatttggtctaaggttgctcaggcgttcgcgttgtcgcgaacctattctggcaccctgttataaccagcaaaaatataccgctagtttaatccttcctggatgcggcggctagtgacaatcgtttttaggctggtaggggagttattggcatggattgccgaaatgctttatctgactgggcgacgtggacgtgagttagaggcaacatcaggaggatacggtgaaatctgagcgtagttgggccggcattatctgtggcttcgttctgttcattgtggtgtgcttatcgttgttgttacatatgaaaggggcatttcgcgccagcggcaacccggagctgggcctgctcttctttttgctgccaggggcggcggcgagctgtctctctcctggacggcgggtgctgcgtcctttgctcggcgcgatactggcggcgccggtctgcatggtgacgatgcggctgttcttcgtgacccaccggacgttctggcaggagatggcgtgggtgttgagcgccgtgttctggtgcgcgcttggggcattgtgctttttgtttatctgcgcctggcttgatacctggcgcagtcattcatcgagcaaataaattgactcaggcaaacaggccgagattctcttttgcccaggcttcaaaatcggtgcagccgccgatgtgtttctggtcgacgaaaatctgcggcacggtttcaaccggtttgccaacggttttttccaggtcagctttgctgatgccttcggcatgaatatccacgtagcggtagttgaaatcatcacgctcgttggtcagtttttctgccagttctttagcgcgaacgcagtaagggcagcctggacgaccaaaaataacggtaaacattgcttctctccttaaacctcagccggatggcgaatggcgcttatgatgcctgcaacgggcggggagggaaagaaggttctgccttttacttcgatggtttacggctatgtttgataaatgtcggactgtcaaaacacgtatactggcccgacggcgcggtggaattggctggcgcgccgcgtttatcaaccggagaggcgtgatgcgaaaatttgccccattgccgaaaagcatactgctggttgagatcctcgggatggggctgttaaccctcgcctggctctcccttaaccagtatgtccagctgcctgcgcccattgccagcccgaccgcggcgctggtgatgctctttgccgggatcgtgctgatgatccccgccgccatcgtcgtgatgtggcggatggcgcagatcgtggccccgcagttaacgcactctccaaagcctgaatccttgtctgacagagaaaaacgaaatgacgccgaccattgagctgctgcgcagccaccgttctatccgccacttcaccgatgcccccgtgagcgacgaacagcgcgcagagattatcgccagcgcgcaagcggcatctacctcgagttttttacagtgcacctccatcatccgtattactgacccggccctgcgtgaacgtctggtcccgctgaccggcggccagcagcacgtcgcccaggcagcggagttttgggtcttctgcgccgactttaatcgccacctgcagatctgcccacaggcgcagctggggctggcggaacagctgctgatcggcgttgtcgatacggcgctgctggcgcaaaacgcgttgaccgccgccgagtccctcggactagggggcgtctatatcggcgggttgcgcaacagcattgaggccgtcacagagctgctggagctgccgcagcacgtcctgccgctgttcggtctttgccttggctggccggcggataacccggatatcaagccgcggatgccggcggccatgctggtgcatgagaaccgctatcagccgctggataacgcgctgctggcggagtatgacgaacagctggcgcactattatctgtcgcgcggcagcaacgcccgccgcgatacctggagcgaccatatccggcgcactatcgtgaacgagagtcgtccgtttattcttgactatctgcataagcaggggtgggcaacgcgctgattacgtgtacactgctgctccggccaggtgatatccgccgccggccgcaggaaaggtgaaagtgtgttcgatagctgaggcccgccagagcgggtcttttcgcagaggtgcaggatgaaaattgccatattatcccgggatggaacgctttattcatgtcggcgcctgcgcgaagcagcgcaacagcgcggtcatcagatcgagatcctcgatccgctttcctgttatatgaacgtcagcccggtggcctcgtcgatccactacaaagggcgtcagctgccgcactttgatgcggtgatcccgcgcattggctcggcgatcacctactatggcaccgcggccctgcgccagtttgagctcctgggaagctatccgctgaatgagtcggtcgccatcacccgcgctcgcgataagctgcgctcgctgcagctgctggcgcgccagggcatcgatctgccattgaccggcatcgctcactccccggatgacaccagcgatctgatcgccatggtgggcggcgcgccgctggtggtgaagctggtggagggcacccaggggatcggcgtggtgctggcggagacccgccaggcggcggagagcgtgatcgacgcctttcgcggactgaacgctcatattctggtgcaggaatacattgccgaagcgaaagggtgcgatatccgctgcctggtggtcggcaatgaggtggtggcggcgatcgagcggcgggcgaaagagggggatttccgctctaacctgcaccgcggcggcatggccacggtggcgcagattagcgacgaggagcgggccattgccatcaaggcaacgcaaactctcgggctggacgccgccggtgtcgatattttacgcgccgcccgcgggccgctggtgatggaggtgaatgcctcgccggggctggaaggggtggaaaccaccaccggcgtggatgtcgccggcaagatgatcgcctggatcgagcgccaggcgacgccggaattctgtttgaaaataggcggctaaccgccggatgcaagacggccatggtatgcggcgctttttttgcgtaagctatggcgtcgtttttccactgtaagaggtcacaggcactatggattcactggtcgttccaggtctggatacgctacgtcgctggctggacgagatcggcatcagcttttttgagtgcgattcctgtcaggcattgcacctgccgcatatgcagaatttcgacggtatttttgatgccaaaattgacctggtggacaacgtggtgctcttttccgccctggcggaggtgaagccgtctgccctgctggcgctgtcggcggatctctcggccatcaacgccagctcgttaaccgtgaaggcgtttatcgacattcaggacgataatttgcccaagctggtggtttgccagtcgctgtctatcggcccaggggtgaccatggagcagttcgcctggttcttccgccaaagcgaagagcagatctcgatggtaatccttgaagccggcgcaaatcagctgctgtacaaaggcgaagaagaagagcctgcggcggaaaacgtgcaataccattttcttcactaaacctgcctaaaattagcgcagccactaccgcagcggctgcgtattacccgcttttattctgcatttaacctttctttaaagcattattcaccgccattcaggccgttttggcttatcacgtagaccgttattgcataaaaatttgataaaaggcgtttttttacctgggctatagcctcttattctggctacagttattctggcgatgcttccagttgcgagcaaccactccgggagagatccgctctccttttctcaggcaatgaaaaaatatgcatgatttttgcatgcgtagaaatgcgtatatttgagcccgtaagttaacgggtgttgagaaggaaaagagatatgaccgcctttggtaaaaaatggttaacaggtctggttacgggtgcgctgatggccgtctctgccggttcgctcgccgccgaacaaaaaaccctgcatgtttataactggtctgattatatcgcgccggacacggtagcgaattttgaaaaagagaccgggattaaagtggtgtatgacgtttttgattccaacgaagtgctggaaggcaaattaatggcgggtagcaccggtttcgacctggtggtgccgtcggcaagcttcctcgaacgccagctggcggcgggcgtgttccagccgctggataaaagtaagctgcccaactggaagaatcttgaccccgaagtgctgaagctggtcgccaagcatgacccggagaataaatacgccatgccttacctgtgggcgacgacgggcattggctacaacgtggataaggtgaaagccgttctcggcaaagatgcgccggtggacagctgggatctggtgctgaagccggagaacctcgaaaaactgaaaagctgcggcgtctccttcctcgacgcgccggaagagattttcgccaccgtgctgaactacctcggcaaagatccgaacagcagcaaagcggatgattacaccggcccggcgaccgatctgctgctgaagctgcggccgaatattcgctacttccactcttcgcaatatattaacgaccttgccaatggcgacatctgcgtggcgatcggctgggcaggggacgtctggcaggcggccaaccgcgcgaaagaggcgaagaacggcgtcaatgtctcctactttattccgaaggaaggcgcgctggcgttctttgacgtctttgccatgccggccgacgcgaagaataaagatgaagcctatcagttccttaactatctgatgcgtccggacgtcatcgccaaaatcagcgaccaggtgttctacgccaacggcaacaaggcttccacgccactggtcagcgagactatccgtaacaacccggcgatttatccgccagcggatgtgttcgccaaactgttcacgctgaaggtgcaggatccgaagattgaccgcgtgcgcacccgcgcgtggaccaaagtgaagagcggcaaataattcctgacggcccgtcgaacacgggccaaatcagatctgcactcgccgggaaatagcagcgcgcccggcgagcagaagcaccaggatggtgcaaatgcactgttaagcacgaagtatggcaccggaccatatggtgatcgtttttttgccggagagcacccgattgaacgacgtaatgccccgcccacaggcgaaagcccccaaagcgctgaccccgctactggaaatccgtaacttaaccaagtcgtttgatggccagcatgcggtcgacgacgtcagtctcactatctacaaaggcgaaatttttgctctgctgggcgcgtcaggctgcgggaaatcgacgctgctgcgcatgctggcgggctttgaacaaccgaccgccgggcagattatgctcgacggcgtggatctggcgcgcgtgccgccctatcagcggcctattaatatgatgttccagtcctatgccctgtttccccatatgaccgttgagcagaatattgccttcggcctgaagcaggaccgcctgcctaaggcggaaatcaccgcccgggtgcaggagatgctggccctggtacatatgcaggagtttgccaaacgtaagccgcaccaactctcaggcggccagcggcagcgcgtcgcgttggcgcgcagcctggcgaaacggcccaagctgctgctgcttgatgaaccgatgggggcgctggataaaaagctgcgcgatcgcatgcagctcgaggtggtggatattcttgagcgcgttggcgtgacctgcgtgatggtaacccacgatcaggaagaggcgatgaccatggcgggccgtatcgccatcatgaatcgcggcaagtttgtgcagattggcgaaccggaagagatttacgagcacccgaccacccgctacagcgccgagtttatcggctcggtgaacgtctttgaagggctggtgaaggagcgtctggaagacggtctggtgctaagctcgccggggctgatgcatccgctgaaggtcgaccccgacgcctctgtggtggacaacgtgccggtctgggtggcgctgcgtccggagaagatcatgctgtgcgatgaaccgccggcggacggctacaattttgccgtcggcgaggtgattcatatcgcctatctgggggatctctctatctatcatgtgcgcctgcaaagcgggcagatgatcagcgcccagctgcagaatgaacaccgccatcggaaagggacgcccacctggggcgatgaggtgcgtttatgctgggatgctgacagctgcgttgtgctgacggtgtgaggagagggcgatgaataccgttgaatccccgtcaggggcgaaaaaaccgggcggcttcgcgctgtgggcggcgcgcctgcagatggcgcatggccgcaagctggtgattgcgctgccctatctgtggctgatcctgttgtttatgctaccgttcctgatcgtgttcaagataagtcttgccgagatggcgcgggcgatccctccctacaccgagctgatggagtgggcggacggccagctgacgctgacgcttaactttgccaacttcctacagttgactgacgatccgctctattttgaagcttatctccagtcgctgcaggtggcgggtatctcgacgatctgctgcctgctgctgggctatccgctggcctgggcggtggcgcacagcaagccgtcgacgcgtaatattctgctgctgttggtgatcctcccgtcgtggacctcgtttttgatccgcgtctatgcctggatggggctgctgaagagcaacggggtgttgaataacttcctgctgtggttaggggttatcgatcagccgctggagatcctgcacaccaacctggcggtgtacatcggtatcgtgtatgcctatctgccgtttatggtgctgcctatctacaccgcgctgacccgcatcgactattcgctggtggaggcctcgctggatctcggcgcccggccgctgaagaccttcttccaggtgatcgtcccgctcaccaaaggcggcattatcgccggctccatgctggtgtttatcccggcggtcggcgagttcgtgatcccggaactgctgggcgggccggacagcatcatgattggccgcgtgctgtggcaggagttctttaacaaccgcgactggccggtcgcctcggcggtggcgattgtcatgctgctgttgctgatcgtgccgatcatgtggttccacaagcaccagcaaaaacagatgggagagcagggatgaacgacttgccggtagtacgctcgccgtggcgcattctgatcctcgtgctcgggttcaccttcctctacgccccgatgctgatgctggtgatctactcgttcaacagctcgaagctggtaacggtctgggccggatggtcgacgcgctggtatagcgaactgttccacgatgatgcgatgatgagcgcggtaggattgagcctgaccatcgccgcctgcgcggcgacggcggcggcgatcctcggtaccatcgccgcggtggtgatggtgcgctttgggcgttttcgcggctccaacggcttcgcgtttatgatcaccgcgccgctggtcatgccggacgtgatcaccggtctctcgctgctgctgctgttcgtggcgctgggacatgccatcggctggccgtcggaccgcggcatgttgaccatctggctggcgcatgtcaccttctgtaccgcctacgtggcggtggtgatctcctcgcgcctgcgcgagctggaccactctattgaagaggcggcgatggatcttggcgccgcgccgctgaaggtcttcttcgtcatcacgctgccgatgattatgccagcggtgatctccggctggctgctggccttcacgctgtcgctggatgacctagtgatcgccagctttgtctccggtcccggggccacgaccttgccgatgctggtcttctccagcgtgcgcatgggggtcaacccggagatcaacgccctggcgacgctcatcctcggcgtggtcggtattgttggttttatcgcctggtatttgatggcccgcgcagaaaagcagcgagtgcgcgatatccagcgtgcaagacaaggctgaaccacctaaaatcggtacagcagcctccggtcggcgccaccctgtggcgccgttttcatggaagacattacgttgggattgtttacgaaaactcgctcatcgcatgcccgccttaacgtccctgcgctggtgcaggtggcggcctttgctattattttgattcgtggcctggatctgctgatgatccttaatctgttgggcctgcaggggctgaacgaattcatacaccgcagcgttcagacctggaacctgacgctggtcttcctcggcagcctggcgctggtgtttatcgagatctggtgcgccttctcgctggtgaaagggcgcaactgggcgcgctggatctatctgctgacgcagattatcgctgccggctacctgtgggcggcgtcgctgggctacgggtatccggagctgttcagcattcccggggaatcaaaacgagaaattttccactcgctggtgatgcaaaaactgccggatctgctggttctgacgctgctgttcgtgccggcgaactgccgtcgctttttccgcctgcaataacggtgatacaatccccgcccctggatttttgaaggtcaattatgcattgcgcactctacgacgccggctgttgccgctcctgtcaatggctggagcggccggtcccgcaacagctcgccgataaaatggccgatctgcgcacgctgctggcggcgatcccggtcgcagcctggggcgagccggtcagcgggccggaggcggctttccgtaacaaggctaaaatggtggtcagcggcagcgttgagcgtccgctgctggggatgctgtaccgcgatggcactccggtggacctcaccgactgcccgctctatcccgccgagtttgccccggtttttgctgccctgaagccctttatcgcccgcgccgggttaacaccttacaacgtcgcgcgcaaacgcggggagctgaaatacctgctgctgaccgccagccagcagggggagatgatgctgcgcttcgtgctgcgctcagaggccaaggtggctcagctgcgcgccgcgctgccgtggctacaggcacagctgccgcagctcagcgtgatcacggcgaatatccagccggtgcatatggcaatcatggaaggtgagcaggagatcttcttcaccgaacagcaggcgctgggggaggtctttaatggggtgccgctgtggatccgcccgcaaagcttctttcagaccaatccggcggtagccagccggctgtacgccacggcccgcgactgggtgcgcgcgctgccggtccagcatatgtgggatctgttttgcggcgttgggggatttggcctgcactgcgcgacgccgacgatgcgcctgaccggtatcgagatcgccccggaagccatcgcctgcgccagacagtcagccgcgcagctggggctcagcaatctgcattttcaggcgctggactccacgcagttcgccactcacgaagcggatgccccgcagctggtgctggttaacccgccgcgccgcggtattggcgctgaactatgcgactatttaagccgcatggcgccgccctatattatctattccagctgtaacgcccgcaccatggcgaccgatatcgctcgtcttagcggctatcgcgttgagcgggtccagctgtttgatatgttcccccacaccgcccactacgaagtgctgaccctgctggtccgcgaagtttaaacaaaatgtgaaggctttgcgccgctgaaatagggtaagcttgaggcagcatgttttgttattggtggggggaatctaatggccaaaaccattctgctggtggaagatgacgaggatatagccacgctgctgcggctcaatcttcaggatgagggctatcagatcgtccatgaagccgacggcggccaggccctcgcccggctggagacgcaggtctgggatgcggtgatcctcgatttgatgctgcccggcgtcgatggtctggagatctgccggcgtatccgccagatgacccgctacctgccggtgattatcatcagcgctcgcaccagtgaaatgcaccgcgtgctgggcctggagatgggcgccgacgactatctggcgaagcccttttcactgctggagcttatcgcccgcgtcaaagcgctgtttcgtcgccaggaggcgatggggcagaatctgctgatggacgccgggcgcctgtcctgccatggcctgagcatcgacccgctgtcgcgcgaagtgaagctgcgcggcgagacggtggacctcacgccgcgtgaattcgacctgctgtattacttcgcccgccaccccggggaagtgttttcccgcctggcgctgctggagcaggtctggggatatcagcacgagggctatgagcataccgtcaatacccatatcaaccgcctgcgcagtaaaatcgaacgtgacccggccgagccggacatcattcttaccgtctggggaaaaggctataagttcgccccggtgacgcaagaggccgccccgtgatccgccgcctgagcctcagccagcggctggcgctggtggtggtttccctgctgatgctatgcgcggtggcggtatgcgccgtccagttacacagcagcgcgcagtatggcaacgccatggtgcagcgtctgtcgtccgggctggctcaacagattgtcgcccgcgagccgttgctggacgcccacggcgaggtcaaccggcaaaccctgaagtcgctgtttgaccgactgatgacctttaatcccagcgtggagctctatctgctgtcgccggatggcgacctgctggccgatgcggcgccgccgggccatatccagcgccagcgtatcgacatggcgccggtgcaggcttttctcaccggcagtgcgtcgccggtgtatggcgacgatccgcgcagtcccgacggacgaaaagtcttcagcgccgccccgctgcgcgtcgacggccaactgcgcggctacctgtatatcattttgcagggggagacgtttaatcagctggcggccgacgcctggcaaaaaacgctgtggagcattgttctgtggacgctgctgctggtggccctgtttggcctgctggcaggggggctggcatggttctgggtcacccggccggtccgcctgctcaccgcccaggtggcggcgagcggccaggacagcatcagcgccatcaaaaccctggcggcccgcaggccggagccccggcctggtaacgaggtggcggtgctcgagaaccgctttattgaccttgcccggcagattgccgatcagtgggatcggctggccgacagcgatcgccagcgccgtgaatttgtggccaatatctctcacgatttgcgcacgccgctgacttcgctgctggggtatctggaaacgctgaccctgaaggatgaatggctgaccgccgaggagcgcaggcagtatctcaccatcgccctgcgccagggcaacaaagtgcgccatctctcgcagcagctgtttgagctggcgcgactggagcatggaggcattaagccgcagcgcgagcgtttcgcgatgggggagctgatttccgacgtggcgcagaagtttgaattaactgcccgcacgcgcgaggtgaacctgcatattgatgtaccgggaccgctgccgctgattaacgccgatgtgtcgatgattgagagggtggtgaccaatctgctcgataacgcgatgcggcatactcccgtcggcggggagatccgtctggcggtctggcaggagaatcaacagcttcaggtcgaagtggcagacaacggagcgggcgtcgatgccgcgctgcgcgacgatctgttccagcggccgtcggcgttgtctacccaggcatcgcgggaggatcgcggtgggttagggttgctgattgtgaaacgaatgctggagctgcacgggggcgatatcagactggtggagtcggtaagcggggcgcggttcaggttcttcgtgccactttgagaaatcgccgggtggcggctacgccttacccggccaacgtggaagagcggtggccgggtaagcgcagcgctacccggcgaaaaaagttactccgggaaccactggttgctaattttctggtaggtaccgtcggccttaatcgctttcagcgcggcgttcagtttctccagcagcgccttgttatccgggcgcacggcaatgccgagtccggtgccgaagtattgcgggtcggtcactttcggcgtggctgcccccagctgcgggttagttttcagccattcgttgaccactgcggtgtcgccgaacacgccgtcgatacggccatttttcaaatcgataatcgcattctggtagctgtcataggcgacggtcttcacctcaggatgcttatcctgcagatatttctggtgggtggtgccgttttccatgccgatccgtttgcctttcaggtcatcgaaagaatggaacgcatcttttttggcgatcaccagcgccgagttggcgtagtacgggtcggtgaaggccacctgcttgctccgctccggcgtaatatccattccggaaatcaccgcatcatatttcttgaacttcagcgccgggatcaggctgtcaaacgcgtggttggtaaaggtacattctgcctgcatttgtttgcacagcgcgtgggccagatcgatatcaaagccgacaatctggttatttgcgtccatcgattcaaacggcggataggttgcggagacgccaaagctgattttttccgcggcagcggcgccgaacgcgaaagaggtgagcagtgcagccagaactaactttttcatcgtggaactcccgtctgtctatcttatgattattcgccgtgtctgcggcatagagtgacaatgccattaaatgaatttatatgcaataaaaatgattaagtatttttatcgtcataaaaaaagacggacaggtgttagacttgtccgccttgctgtttgctttttatgcaatatgctcaggtgctagctacgtcgctcgaaggccagcgctttgcgttccaccaggcgcatcagcagcgtcagcagtccattaacgatgagatagataatcccggcggcgccgaacaccatcacgtcgtaggtgcgtccgtacagcagctggccgtggcccatcacttccatcagcgtgatggtgtaggccagagaggtactcttgaaaaccagcaccacttcgttggaataggacgatagcgcacgcttaaaggcgtacggcagcaggatcgccagtgtatcctttttactcatccccagcgcgctgcaggactgccattgcccgtcggggatcgcccggatggcgccataaaacagctgagtggtgtaggcggcgctgttgagcgacagagcgatcagggcgcacagccacggctcggagataagatgccacagccacggatactcctgcagcgaagggaactgtcccgggccgtagtagatcaggaagatctgcaccagcagcggcgtaccggtaaacaaggtgatatagccgcgcactatccataccagccccggcgtcttcagggtcaggataatggtgaagatcagcgacaggatcagcgccacgataatcgacgccacggtcagcgtcaggctggtatgcagtcctttcagcagttcgggtaaatagtcgagcatcagcctggtctccgttcgaagcgcgtcgcacgctggtcaatccgcttaaggatgtattgactcaacagggtgatgacgagatagattgccgccgcaatgatataccagttaaagggttcctgagtgcgggtggcgatgcttttggtctgcagcattagatcgttgacgctgatcaggctcaccagcgcggtgtccttcagcagcaccagccactggttaccgaggccgggcagggcatggcgccacatctgcggcatcaccagacggaagaatatggccgctttcgacagccccagcgcctggccggactcccactggccctgcggaaccgctttcagcgcgccgcgcagcgtttgcgaggcgtaagcggcgtacagcagcgacagggcgatcgccccgcagaggaacgggctgacgtcaaagttctcaatctgcatctgcaccgggatctgcgtgaacccgagcgggatggtgaaaccgtcagagagcgtcagcagcagctgggaagagccgaaatagataaacagcaccaccagaatttccggtagcccgcgcaggatggtcactatgccggttgcaagccaggctaccgggcgccatttcactgactccagtaccgcaaagagcatcgccaggaccaggccgatgacgagcgcgcaaacggcaaggccgacggtcatcccggcggcgcttgctaatggaaaaatttcgttcattcagtcttacttctggaaccatttgttatagatggtctggtaagtgccgtctttcttcactttttccagcgcagcgttaaatttctgctgcaggtcggtgttgccctgacgtacggcaatgcccagcccggtgccgaaataggctttgtcggtcactttatcgcccaccgccgccagcttcggattgctcttcagccattcggtcaccacggcggtgtcaccaaagaccgcgtcgatacgaccgttctgcaggtccagcttcgcattctggtagctgtcgtaaggcacggtagtgatttccggatgtttatcggtgatgaatttctggtgggtggtgccgttctgcacgcccacttttttgcccttcagctggtcaatgctggtgaacttaccctgctggccgacgaacagcgccgagttgtcataatacggggtagagaacagcacctgcttttcacgctccggcgtgatgtccatcccggccatgaccgcgtcgaaacggcggaatttcagtcccgggatcaggctgtcaaaggcctggttggtgaaggtacaggtggcgtcgatctctttacacaacgcgttcgccagatcgacatcgaaaccgacgatctggttgttggcgtccaccagctcaaacggagggtaagaggcctcggtggcgaaacgaatggtctgcgcggcggaagcggagaggctcatgcctgcgagcagggcggcaatcagtacttttttcatcgtcatttccccgaaaaacatcaatgtgaaagatagtttttaaacgcgtcagtttgcggatgcgtgaagcaggaggcatccccttgctcgacgatatggccattttccatatacaccacccggctggccgtcttgcgcgccacttcaacttcgtgggtgacgataacctgggtaatgccggtttcagccagctcgcggatgatgctgacgatctgggcagtgatttccgggtcgagcgccgcggtaggctcatcgaacagcagaacctgcggctccatcatcagcgcgcgggcgatggccacccgctgttgttggccgccggataaatgcagcgggtaacgatcgctgtacggcttcagacgcaggcgctccagcagcttctctgcgcgagccagcgcctgatccttgcttaaccccagtacgcggcagggggcctcgatcaggttctgctgtaccgtcaggtgcggccacaggttgtattgctgaaagaccatgccgacgttctgacgcagctcgcgaatcgctttatcggacggcgctctggtgaagtcgaattggttgccggcgatggataacgaaccggaccgcggcatctccagcaggttgagtacgcgcagcagcgagctcttcccggcaccgctggggccgagcagcaccagcgtttccccctgcgggcaatccagcgtgatgtcgaacagcgcctggtgtgcgccgtagaagcaattaatgccgtttagtttaatactcatctgggcagtctgatacgaatagctattgaggccgcaaatactacctttggcagaatagttatgcaatatttatgcgttaaaagttaaatctaaaccacgtttagctttaaagttagcacaaaatatggcctggtgggtgaggggggcgcaaatgtcggcattcctggggcgaataccgacattttaccggggttatcgtttcagcggcgtcgcttcaactccggaatcagcgtttctccagactctgtcgcagcgtcccggctggcgcatggctgttgttgccgagatagcgaacgtcatcgacggcccagcactggccttcctggatcatcagcacttcatctttccagctctgggtgccctgtttcagatcgacgcgcagcggaatattgcgcgcatcgcggttcgggatggtggaggcgctggcgaccacggcgctgtctgccggggtgctgctgctggagaacggattagcctgcagtaatttgctgttggcgggatcctggcgggcgtcattgagtaactgcgccaggccgtcgctcagataggggcgcagcgccgccggatcctgagtacgattctggatctgggtgtcgtagaatttttgcgctacgtcgtcagggccgccttcgacgcaggggccgctgcgggtgccattatctttataggccggggtgacggtcgtacaggcgctgagcgccagcgcgcaagggagaagtacagcaaaaagtttgtagcgcatgatgatttccttataagcgaactacgttttcagtttccgttaaagcatagcgtatagcgtgcggattgtacttgacgcaaagagctaagaccttgatgtggctacagccttagggcgggaaatcggcacggggatgacagaattccgtcaggcgctaaaaggcagggcagtataaaaataaacttaattttcccgtgaacaagaaatattacccctaaaatagggaaatggctcttgaaagataagggtaattatttcttcttatagatgcgagtggcgacgtgcatttttttatccgtattaccggaggacgggacaatgacgccccccttgttcatttgtttttttaatcagctcttcacgggcatcgttggatgcggtttgaccagtagaggaaatggcgccgattttggtatattgcgtatggactttatcaaaagctgttttgttaaaatttctgcggagacggcattggccgcttaaaacaatgctgtacctgccactaaagctgcatatttaatattcttagcccctattgtttatctcgctatcatcatgctcttgtttgcattcaccaatgaatgattcagattgaactcacactgctttttgtaagcaaaatgctgcaatttaatgacggttagttaacgctttttagcgaaaagatgacgtatttcgcagtgctgatgcttgttttttgagccggttacccatcgggagcggaccaggctattttcttcggtcgttagctgaaaatcaccctgagaggccggagctgaggggatagggcgctgacagacattcccggtaacatggtttatcatatagaaaagcaggggctgcgcccatggtcatgcaggtcaccagggagttaagatgttaacaaataagcgagagcgcgcccggcagcagcgagccgcgttgtgggccaccagagataatgtccagcgccatgcgctgtccatgagtatgccctggctcgcctttgtcaatatcgcttttgcgttaatgattttcttccgcaattttatctttacctattttgataagaggctactgacgcatcgggcggttattccttatatcgaagcggcgttgattgcggttattatcatttcggccattttagtgattattgccgtcacgccgcgactggcgcagggacgatatacgttgaatatcatcaccgggctgctgctggtgctcagtctgtgctggtccctgagtaattattgttttatttttttctggaccttgccctttgcctggccgctgctggtgatattaatgactaccggcctcaccgcgctgtatcaccattggcccggcattaccgcttttatgctgccgctatgggtgaccgccttgctggcgggaatacagctccactatcacaccgagatccgctttttgatcctctgggccatttttatcgcgattttgctgtatggccgacgtattttgcagcgctggtatgacgaggcctgggatacccaccaggagaatatgcagcttattcagcggctggaaagtatcgccaaccaggatgccttaaccggaaccgctaaccgtcgggcgctcaatgcttacctggcggcgatctggcagcaaaaaacgccgctggcgctgatgatgatcgatgtcgattattttaagcgctataacgatcgctatggccatcaggctggtgatgaatgcttatcttctgtcgcgcaggtgcttaaaatggcggtccgggctgagggcgatctggtggctcgctacggcggcgaagagtttgtcgtcgtgttgcccggggtgtccttagcgcatgccaccgctattgccgagcgcattcagcagaagatccgcgaggcaggcctaccgcacgccgcttcggcggtggcgtcggaggtcaccgtgagtatcgggatcgtcgcctccgatggcacggtcccgatagagacgctgatcgcccgggcggacagtgcgctgtatcaggcgaaaaataatggacgtaatcaatggtcttattaacccggagacgctgccgggcaagggagaagggatgaaacggatgatgcggatcgtgctgctggcgctgctgctaaccggctgcgctggggaaaagggcattatcgatcgcgacggataccagctggacacccgtcatccggcgcaggctgcctatccgcgaataaaggtgttagtgatccactatacggctgacaattttgatgtctcgctggccacgttgaccgataaagaggtcagctcccactatttaattcctgaacagcccccgcgttatcagcataaaccgcggatctggcagctggtgccggaagaggatttagcctggcacgccggggtaagctactggcgcggtagtacgcgcattaacgatacctccattggcattgagctggagaaccgcggctggcagaagacggcgggcgtcaaaagttttaccccctttcatccggaacagattgcggctctgatcccgctggcgcgcgatatcatcgcccgctaccacatcgcgccgcagaatgtggtcgcccatgcggatatcgccccgcagcgcaaagacgatccggggccgttattcccctggcaacagctggcgcagcaggggatcggcgcctggcctgacgagcagcgggtggccttttatctcaacgggcggccggccagcgagccagtggaccccgaaatcgtactggatttgctctcgcgctatggctatcaggtgacgccggagatgacccccgcgcagaagaagcgggtgattatcgccttccagatgcacttccgtccgcagcgctgggatggggtagcggatgcgcaaaccgaagcgatagccgaggcgctgttagaaaaatatggccagggttagcggtgtagtttaccgtggtcgcgaagccaggcggcggtgcgcacgatgccgtcgtcaagcgtcaccaccggctgatagcccagctcgtcctgcgcgcgggtaatatcgagcgtaaaatcaaagtttagcttggagacgccgtagtgggtaaacgcgggttctttggcggttttatcgccaaagcgctccatgctgcgggcgataatatccagcatcggatagggaactgagcggatccggcatttgatgccgagctcgtcgatcaatttctgcacgatgctccgcaaggtgcgcggttcgccgttgctgatattccacgcgcgggcggagggaagatgatcgcaggccggctggctcgccagccacatcgcatgtacggcgttttcataataggtcatgtcgaccagcgcgctgccgccgcgcgggagcaggacgctgccataatgctgcatcatttgcgccagccgggggataaagactttgtcgtgcggcccaaacaggctctgcggccgcagaatggtaaaacgggtatgcgggttagcctgcgccagcaggttgatcacctcctcgctggccgccttgctgcgggcaaactcgttggcgaagcggtgtggacggaaatcttcctggatatcacgatgatggtgataatcaaaatagagcgatggcgaagagatatggacgaaattgcgcactccccatgccactgaccattcgcccagacgacgggtggcgcggacgttagcgagatcgaaagcctgctgagtgccccatggcgaggtaaagctggagcagtgccatagggtatcgataccggcgagcatcactttagcctgcgaagagaccagctcggttaaatctgccgggatgaattccgcccccattttgctcagaagcttgcccatcgcttcgttgcgcccggtcgctcgcacgctgatgcccttgttgcgcagatattccactgcgttgcggcctaatccgctggtcgcaccggtaaccagtaccttcatatcactctactgtcccagaaaagaatttcgtgcgcatttttccgtgattctcccgactatgcaatgagaatcatgaaagaataacgcttatccttcgactctgcctgagatttgttcggccagccgggcgatgcgttgcgccataccgcggaaaataaacaggtgcgccgggatcatcagcagccagtagatcaggcctggcataccgtgcgggtgccaccaggcgcgcacgtccagttcacgacgatcgcctttatcgttaatggtaaagcttaatcggcccagcccgggcgctttcataccgaatagcagggtgagctgtttttcttcctccacgataattaccttccagctgtcgaccgtatcgccggtttgcagataagcgcgctgcggccgccctttggccagccggtggccgaccagcagatccatcgcgccgcgggttttccacagcagattgccgaaaaaatacccctcttcaccgccgatttggttaacgacctgccacagggcctggcggcttgcctgagtggcgacggtgcaacctgcctgcttcggatagtagccgtactccggtcgccagcgggcgaaagcctgagcgtcgtaaccccagtcgctggagtttactaactgctcttcttctttcagcgtgcggcgaaccgcctgatcgaaggggatcagcgtttgcgggatcagcgcccgcagcgcccgatcgtcagcgattagatcgtgcttcagcccctgaatcagcgccttggcgatggtcggcggcaccgaggtgatgacattgaggaaccacaccgagatccagcgcgtcggcaggggaatgggaatgagcgggcgatgtttaccgctgacggccataaagcgaatgaactgctgctgatagcttaacacctccggaccggcggcttcgaagacgcggtgcgcatcggagggatgattcagcagctcaaccaggtcaacgagcaggttttccagcgcgacaggggtggtacgcgaacgtacccagcgcggaggggttagcaccggcaggttataaaccatgtcgcgcatcacctcgaaggcggcggagccggcgccgacgataatcccggcccgcagctcggtcaccggcacgcccgactcacgcaggagatcgccggtaatctgacgagcgcgcagatggtcggattgctcctgcgccggggcctgcagcgaactgagaaatatcacctggcgcactgatgactgacgcagggcatcgcgcacatacgtcgccacccgccgctcatgggcgataaaatcaccgccttcgcccatgccgtggaccagataataaagggtatcgataccggtgagtagcgcaggcaggtcctgcggttgattgagatcgactgaccggcaggtaacgccgggcaaagcgagtttttgcaatcggtcgatatggcgtgccgccgccagcaccggatagccccgcgcgcttaactcgcgcactaaatgctggccaatatagccgctggcgccgagcaccagaactgattgcgacacgcctgactccttagcgttgtaaaaaagcctgccagtgggcgaccacctcgctcagctgctgacggttgacatccaggtgagtgaccagacggacaacaggcgaggcgttaatcaataccccctgcgcctgcataaacttgccgagcgccggggcctgctcttcgccgacgcgaacgaacagcatgttggtatcgtgacgggtgacgtcggcgccgatagcgcgcagccgctccgccatccacgcggcgttgtcatgatcctcctgcaggcgctgcacgttatttttcagcgcgtacagcccggcggcggccaggatgcccgcctggcgcatcccgccgccgaccattttccgccagcggacggcgcggcgaatgtacgcctcgctgccgagcagcagcgagcctaccggagcgccaagcccctttgacaggcagatggtgaaggagtcgcagtattgggcgatatcgcgtaactcgcagccgtaggccaccacggcgttaaagatgcgcgcgccgtcgacgtgcagcgccagattgcgctggcgggtaaacgcccaggcttcctgcagatagtcgcgcggcagcaccttaccgttatgggtgttttccaggctcagcaggcgggtgggggcaaaatggatatcgtcgggtttgattttcgccgccactttatccagcggcagcgaaccatccgccgcggcgtcgatcggctgcggctgaatactgccgaggaccgccgcgccgccggcttcgtacagatagttatgcgccccctggccgacgatatactcttccccgcgctggcaatggctgagcaggccaacgaggttggcctgggtgccggtgggtagaaatagcgccgcttctttgccggccaggtcggcggcatagcgctgcagttcattgacggtagggtcgtcgccatacacatcgtccccgaccggggcggccatcatggcctccagcatggcgcgcccgggacgggtaacggtatcactgcgtaaatcgatcacggcttttccttggtctggttcaacgtattgcttctgttttacctgagccagttggttttcgccagttcgatgacctcatcgccgcgcccgctgatgatcgcccgcagcatatacaggctaaagcctttggcctgctccagcttgatctgcggcgggatcgccagttcctctttggcgacgacgacgtcgaccagcaccggaccgtcggtgcggaaggcggtctgcagcgcttcatccacctcggaggctttttcaacgcgtatacctttgataccgcaggcctcggcgatgcgggcgaagttggtatcgtggagctccgtaccgtcggtgagatagcccccggccttcatttccatcgccacgaagcccagcacgctgttgttaaagatgacaatcttcaccggcagcttcatctgcgccagcgacagaaaatcgcccatcagcatgctgaacccgccgtcgccgcacatggccactacctgccgctccggcgcagtggccttggcgccgatggcctgcggcatggcgttggccattgagccgtggttgaacgagcccagcaggcggcgtttaccattcattttgagatagcgtgccgcccagacggtcggggtgccgacatcgcaggtgaaaatggcatcttcattggcaaaatgactgatctgctgcgccagatattgcgggtgaatggctttatcgctgggtttagccagatcgtcgagcccttttcgcgcgtcgcgatagtgctccagcgccttatcgaggaagtggcgatcggttttctcttccagcagcggcagcagcgccttcagcgtcgatttaatatcgcccaccagcgccatgtcgaccttactgtgtgcgccgatgctgccggggttgatgtcgatctggataattttcgcgtcggttgggtagaaggcgcgataggggaactgggtgcccagtaggatcagggtatcggcgttcatcatggtgtggaagccagaagagaagccaatcagcccggtcatgccaacatcgtacgggttgtcgtactccacgtgctctttgccgcgcagggcgtggacgatgggggctttaattttggctgcgaactccaccagttcctggtgggcgccggcgcaaccgctgccgcacatgagcgcgatattgctggagtagcgaataagctgcgccagcttgcgcagctcttcttccgccggggtgaccctcggcagcggcgcatgataccagtggctgctggcgctttccggggcggccttcagcgccacatcgccgggtagcaccaccaccgagacgccgcggttaatcactgccttacgcatcgccactgccagcacctgcgggatctgctccggcgtggagaccagttcgcagtaatggctgcactcgcggaacagctcctgaggatgggtttcctgaaaatagccgctgccgatttcgctggatgggatgtgggcggcgatggccagcaccgggacatggttgcgatgacagtcaaacaaaccgttaatcagatgcaggttgcccggtccgcaggagccggcgcagaccgccagctcgccggtcagctgcgcttccgcgccagcggcgaaagcggcgacctcttcgtgccgggtgggcatccagtcgatggtgcccatgcggttaaggctatcgctcaatccattgagggaatctccggtgacgccccagatacgtttcacgccggcctgttccagcgttttggcaatgtatgccgccacggtctgtttcatgatctccatctcctttttttgataacgccttcaagcttagatgaaactgaccgcaatgtaaccgattacccctgattttttgctggttttattcctctccggctgcgcatactctggaagtacacaggatgcaaaacaggatgcacatcaaatggttaaaggattgttaaacacagtaaatcgcaggctgtcgcatgatgacgccggtaaactcttgttacgacttgccgtcggcggcttaatgcttttccatggaatccataagctgatagatggtgtggatggcattagcgggatgctggcggcgcagggattgcccgggtttatcgcctacggtgtgctggtgggggaagtggtcgctccctgcttgttaattctcggcgtcctgacccgcccggcggcgttggtgctggcgttcaccatggtggtggcgtggctgatggtcggtctcggcaagacgtttgcgcttgatacggtgggagcgtgggccattgagaatctggtctatttctttgttggcgcactggcgattgcgctactcggcgcggggcgttattcgctggccggtcagtcggcctggcggtaaaaatgcctcattcgtcctggggcgtaaagtcgatactgttggcgatttgcaattttttcagtccgggaaagcgtttatctcatgtcgcctgagcgtttgtttattgtcgccagggattttcccggaggcggcgcattgcgccttctccgggctaccaaatcgcacagcgatgtagccccggtaagcggtagcgccaccggggattttgacctcaggcgagaaccagatcgctctgcggatgacaggagcaggccagcacatagccgtcggcgatttcggcgtcggtcagcgtcatggtgctggtgacgctgtacttcccggaaaccactttggttttgcagcagccgcagacgccggcgcggcaggcgacggtcaccggcactttattgctctccagcgcgtcgagcagcgtggtgcccaccggcgcgtaaaactcgcgcgccggctgcagtttagtaaatttcagcccgctggtggcggcctcagccaccggggtgaagaatttttccttaaagaagcgggtgacgcccagggcggcaacatcctgctcgaccttctccatataaggcgccgggccgcaggtcatcacggtgcggctggctaaatccggcacgctctgcagcagctcccgggtcagacggccggcgacaaaaccgtgcgtcgcgttgtgctccgctaccagggtgaccgggtagttgcgccactcttcggcaaagattacatcttccggcgaacgcacgttataaatcacctgtacgtcggcctgcggtcgatgcttagccagccagcggcgcatcgccatgatcggtgtcacgccgcaaccggcggccagcagcaggaatttatcttccgctttatcgtcgcaggtaaactcgcccatcgcatcggacagccaaaggtaatcaccgcgtttgacctcgcgggtcaaccactgcgaacccgtaccctcgtcaatacggcgaacggtcagcgtaatgtattcgctgacccccggcgtcgaggagagggtataggcgcgcagcgtttccgccgagttacgcacgctaaccagagcgtactggccagcgcggtacggatagtaatcgtggcacagcagcgaaagggtccacacgtccggggtttcctggtgaatgtggtgaacctgcatccgccacgggcactgggaggttggcatagtcatcagggactccttaagcgctcagcagctgctgcatatcttgttccacggtggtcacggaacgcagaccaaacttctcattgaggaccgccagcagatccggggtgaagaaaccaggcgccgtcggaccggtgacgatgtttttcacacccagcgacagcagcgtcagcaggatgacgatcgctttctgttcgaaccaggagagcaccagcgacagcggcagatcgttgacgccacagcccagtttctccgccagcgtgaccgccagaataatcgccgagtaagcgtcattacactgcccggcgtcgaccaggcgcggcagcccttcgatatcgccaaagtccagtttgttgaagcggtatttaccacaggccagggtcaggatcaggcagtcatccggcacgctggtggcgaaatcggtgaagtagttacgctccccgcgggcgccgtcgcagccgccgacgaggaagatatggcgcagtttttcacgactgaccagatcgatcagcgtatccgccgcgccaagcagggtctgacggccaaagccgacggtgatcagatgcgggatttcgctgtacgggaagcccgccatctgctgcgcctgggcaatgaccggggagaagtcttcgccttccagatggttcacacccggccagccgacgatgctgcgagtccagatgcgatcgtcgtaggcgccgacggtcgggtcgatgatgcagttagaggtcatcacgatggggcccgggaagcgggcgaactccacctgctggttttgccagccgctgccgtagttgccaatcagatgtttgaatttacgcagctccggatagccgtgagccggcagcatttcgccatgagtatagacgttgacgccggtgccttccgtctgctccagcaggttatacagatccttcagatcgtggccggagatcaggatgcacttcccttcggtggctttaacgttgacctgagtcggcgtcggatggccgtatttggtcgtttcaccggcgtcgaggatgctcatcactttgaagttcatctggccgatttccatcgaacattcgagcagcgcattcatatccgcaggccaggtgcccagccatgccatgattttatggtactgggcatagatagcgttgtcgtactggccgagcacgtgggcgtgctccatataggccgccgcacccttcagaccgtacaggcacagcaggcgcagaccgagaatattttcgccgatggcggctttatctttattcggggtatagtccgccgcctgacgctgcagctcgcccagatcgtcgctgaccagctgcaggtcggcgaccgggctgtcgaccgcggcgctggcatcgatcgccaggcattgcgctttcagcgcctcacgcaaggcaattgcctggcgggcgtagccgacgatgcgcggggaatcgaagttaacgttagtcagggtggagaagaaggcgcgaggggcaaagctgtcgacctgatgatcgataatgccatattcgcgcgctttaagcgcccaggcggacaggccttgcagtgacgcaatcagcagatcctgcaggtccgaggtttccgctgttttaccgcacatcccctgcgcgtaagagcagccgttgccggctggggtacgaatggtttgttcacattgcacacaaaacatggtcacacctttaaagttatatttgatatacatgtttaaggttatgccgcgcggcaacgggtgaaaaggtatttctaagacaacttaaagggagattgatttagcgcaaatttggcggcaggagggctgccgccagcgggtgctcaggcggtaaaaaaggcgatcaggatcgggaccagcaaactaagcagaaaaccgtgcacgatggcggcagggacgatttcgacgccgccggaacgctgcagtaccggtaaggtgaagtccatcgaggtggcgccgcatagccccagcgccgtggagcggctgcggcgaataaggcccggaattaacatgatggccagcagctcgcgacagagatcgttaaagaacgccgcgctaccgatgaccgggccaaaggattcggtgagtaaaataccggagagcgaataccagccgaaaccgctggccattgccagaccggtctttaacggcagaccgagaataaaggcgttaagtatcccgccgagtaatgaactggccgtaaccaccacggcgacgatcattccccggcggttaaggactatttgtcgcagactcattccattattgcgtaattggataccaacgaggaacaggagaaaaatcaacgtatattcgctggcttctgtcgcgtgctgtaaaaaaggcagtctggtcagaccgagcagaaaaccgagcacgaccacaccgcacagctgcagcgattccagggccatggccaggcgcgagggtaatttctcctgacgatgctgactgcgccatggcattttactttccagccacagcagggcggcgatattacacagtaaaatgataaccacgctcaccgcggcgtaatgcaatattgccagcaggttgctggccagattgtcgaggaacgccaggctgatacccataaaaaaaaggattacatagacaatccagctgagcatgcggtttatcagctttagcgcggaggagtgacgaagaggcagtaaatagccgacgaccagcggcaacagaataataaagagtcccgaaaacatgaacgatgcagcccttgcatgatgagaatagcgcccatgacactacccaaatcaccgggccgagtaaagctgtcgccagaaagaaaaagcccggagacccgggctttgaaaagcgttaatcgcgtttttccagcagggtgcgatacagcacgccgccgaggatcccgccgacgattggcatgacccagaacagccacagctgctgcagcgcccagccgccctggaaaattgccaccgcggtgctgcgcgccgggttgaccgaggtattggtgactggaatgctgatcaaatggatgagggtcagcgccaggccgatggcgatgggggcaaagcccgccggcgcatgtttatcggtcgcgccatgaataaccagcaggaagccgcaggtcaggacaatttcaatgacgatagccgacagcatggagaagccgcccggggagtgttcgccatagccgttggaggcaaagccgctggcggcggcatcaaagccggctttaccgctggcaaccacgtacagcaccgccgcggcaataattccgccgaccacctgagcgataatatagccaatgacctcttttgccggaaaacggccgccggcccacaggcctaaggtgaccgccgggttgaaatgccccccggaaatatggccgaccgcaaacgccatggttaataccgttaagccaaatgccagcgcgacgccggcaaaaccaatacccagctcggggaaagccgcggcgagcacggcgctaccgcagccgccaaatacaagccagaaggtgccgaagcattcggctgctaattttctgaacataaccacctcaattaaattgtttacgcgcacgagcggaccgtgccggtctttatttatcgtgataagggatgacgataaaaataaagcggcgttattctagagataatcgccatcccggagccagttaaatatattgatattatttgatttagggcaaggtgagtggattccttttgccagtttagcctttcctttatccatggaagattatcaatagtgtagatcataacgcctgaaataaaactattttgtttgatgaataatcaacagccggtaataggcgataagtgagtaattttatgaatatatttaatccgctgaatatgagccacggatgcgattaagcagagtgtcatcttgcctccgccctcgctatactgttgattactgaaggagagtggtggtgtagcggaggggatatgcttcttgagcgcgtagaaatcgtcggttttcgcggtatcaatcgtttgtcgttgatgctggagcaaaataacgtcctgatcggggagaacgcgtgggggaagtccagtctgcttgatgcgctgaccctgcttttgtcgccggagttcgatctttatcactttgttcgcgatgatttctggtttcccccgggcgacatccaggggcgcgaacaccatttgcatattatcctgaccttccgcgaaacggagccaggccgccatcgggtccggcgtttccgtccgcttcagcgctgctgggtgccttgcgatgacgggtatcaccgggtgttctatcgcctggagggcgagctcgccgaagatgacagcgtgatgaccctgcggagctttatcgatggtgaaggcgaagcgttggtgctggaggagattgatgagctggcccgacacctggtgcgtttgatgccggtgctgcgcctgcgcgatgcgcgctttatgcgccgcatccataacgggacggtaccgcactcgccgcagatagagatcaccgcccgtcagctggattttctctcccgggaactggtcagccatccgcaaaatttatcggacggtcagatccgtcaggggctatcggccatggtgcaactgcttgagcattactttgccgagcaaagcagcgctcaaacgcggcatcgcctgatgcggcggcgctcccatgatgaacagcgcagttggcgttatctggatattatcaaccggatgatcgacaagcccggcgggcgcagccatcgggtgatcctgctggggctgtttgccaccctcctgcaggcgaaagggacggtgcgcctcgatcgcgacgcgcgaccgctgctgttgattgaagatcccgagacccgtctgcatccgatcatgctttccgttgcctggcacctgctgaatttgttgccgctgcagcgtgtgaccaccaccaactccggagagctgctgtccctgacgccggtagagcaggtctgccggctggtgcgtgagtcgacgcgggtatcggcgtggcggttggggccgggcggaatgaatgccgaagagagccggcgcattgcttttcacatccgcttcaatcgcgcctcatcgctcttcgcccgctgctggttgctggtggagggagagacggaaacctgggttatcaacgaactggcccggcagtgcggtcatcattttgatgctgaaggggttaaggtgatcgaattcgcccagtccggcctgaagccattgatcaagtttgcccgccggatggggatccagtggcacgtgctggtggacggcgatgaggcggggaaaaaatatgccgcgacggtacgaggtctgctcaataacgatcgcgagctggagcgcgaccatctgaccagtctgccggcgctggatatggaacactttatgtatcgtcagggatttgatgacgtttatcatcgggtggcgcagatcccggataatgtcccgatgaatatgcggcgggtgatcaccaaagccatccatcgctcatccaagccggacctggcgattgaggtggcgatggaggccggccgccgtggcgtggacgctgtgccgacgctgctgaagaaaatgttctcacgggtgctgtggctagcccgcggtcgtgccgattaatctcaccgccgtcgtcatttacggcggcacaaagctctccggcagctaaacaaaacctcattgacgcgaaaaatgggtgtcctgttgccaacgggtttcgatagaatcaccgcctggagcggcagggaaacagcaggaatcggaatatgaaagtgaagggaaaacgcaggaccgtctggtggctgttggcgatcgttgtgctggggctggctatctggggatggcggatcctcaatgcgccgctgccgaactaccagacgctggtagttcgcaaaggggatcttcagcagagcgtgctggccaccggcaaactggatgccctgcgaaaagttgacgtcggcgcccaggtcagcggacagctgaaaacgctgcacgtcaatattggcgataaggttaaaaaggatcagttgctgggggttatcgatccggagcaggcgcaaaaccagattaaagaggtggaagcgacgctcatggagctgcgcgcccagctcaatcaggcgcgcgcggagagcaaactggcgcaagtgactctggcccgtcagcagcagctggcgcagcgccagctggtctcgcggcaggaccttgataccgcggccaccgatttggcggtgaaacaggcgcagatcggcactattgaagcgcaaataaagcgtaaccaggcgacgctcgatacggcgaagaccaacctcgattacacgcggatcctggcgccgatggccggcgaagtgacgcaaattaccaccctgcagggacagacagtgatcgccgcccagcaggcgcctaacattctgacgctggcggatctcagcaccatgctggttaaagcgcaggtctctgaagcggatgtcatccacctcagaccggggcaaaaagcgtggtttaccgtgctgggcgacccgcttacccgttatgaaggtaaactgaaagacattctgccgacgccggaaaaagtgaatgacgccatcttctattatgcccgcttcgaggtaccgaacccgcaggggatcctgcgcctcgacatgaccgcgcaggtgcacattcagctggctgaggtgaagaacgtgattactatcccgctgagcgccctgggcgacgcggtaggcgataaccgctaccacgttcgactgttgcgcaccggtgaggtcaaagagcgtgaggttatcattggcgcccgcaatgataccgacgtcgcagtggtgcaaggtctggaagagggcgacgaagtgatcgtcggcgagagcgcgagcggggcggcaaaatgacggcgctgcttgagctgcgagatatacgtcgcagctatccttccggcgacggcagcgttgaggtcctgaaggggatcaccctcagcatccatgcgggtgagatggtggcgatcgtcggggcctccggctcgggaaaatcgacgctgatgaatatccttggctgcctcgacaaacccaccagcggcacctatcgggtggcgggaagcgatatcgcgcagctggatggcgatgcgctggcccgtctgcggcgggaacactttggctttatctttcaacgctaccatctgctgtcccatctgaccgccgcgcagaatgtcgaagtgccggcggtgtatgccggcactgaacggcgcgcgcgcctggcgcgcgctcatgagctgctggtgcggctggggctgggcgagcgcgccgactatcaaccgtcacagttgtctggcggtcagcagcagcgggtcagtatcgcccgcgccctgatgaatggcggggaggtgatcctcgctgatgaaccgaccggcgcgctggacagccattccggcgaagaggtaatggcgatcctgcaccagctaaaagcacaggggcacacggtcatcattgtgacccacgatccgcaggtcgccgctcaggcggagcggatcgtcgagatccgcgatggcgagatcgtccgcaacccgcccgccagccgccagggcggcggactgcgcgcccgtccgcaggcggagccttcggcgtggcgtcagtttaccagcggctttcgcgaagcgctggtgatggcctggcgagcgatggcggcgaataaaatgcgtaccctgcttaccatgcttgggattattatcggtattgcctcggtggtgtcgatcgtggtggtgggggatgccgccaagcagatggtgctggcagatattcgcgccatcggcaccaataccattgatgtatatcctggtaaggattttggcgacgacgacccgcgctatcagcaggcgctgaagtatgacgatttgctggcgatccagaagcagccgtgggtgcgctccgccacgccggcggtttcaaaaagcctgcgcctgcgcgccaacaatattgacgttgccgccagcgcggagggggtcggtccacagtattttaatgtctacggcatgacctttagcgaaggcaataccttcaatgaactgcagctcaacagtcgggcacaggtggtagtgctcgacagcaatacccgtcggcagctgtttcccaataaagcgaaagtggtgggagaggtgattctggtgggcaatatgccggccacggtgattggcgttgcggatgaaaaacagtcgatgttcggcagcagcaaaattctccgcgtctggttgccctacaccaccatggcgggaagagtaatgggccagtcgtggctgaactccatcactgtgcgcgttcatgaaggctacgacagtgaaaccgcagagaaacagctgctgcgtctgctggagctgcggcatggtaaaaaagatgtattcacctggaatatggacagcgtcttgaaaaccgccgaaaggaccacacataccttacagctgttcctgacattggtggcggtgattgccctggtggtcggcgggattggcgtaatgaatattatgctggtgtcggtgaccgaacgaacccgggagatcggcatccgcatggcggttggcgcccgggccagcgatgtgctgcagcagtttctcattgaagcggtgctggtttgcctggtcggtggcgcgctgggcgtagcattgtcgctgatgatcgcctttattttacagctgtttctccccggctgggagattggtttttctccgctggcgctgctgacggcgtttctctgttcgacgctgaccggggtgctgtttggttggctgcctgcgcgcaacgcggcgcggctcgatccggtggatgccctggcgcgagaataggcggggcgagaaataaaaatgccagtcagaaggactggcattttattagcaggatgtacacaatgaagcaaaagagttatgcagccgtttccgcttccacagggacgatcacgctggcgtgattgccttttggcccctggtgaacatcaaaccgaacggcttgtccggcttttagcgttctgtaaccatccatctggatggtggagtaatgggcgaaaatgtcttcgccgccgccctcagggcagataaaaccgaaccctttggcattgttgaaccacttaacagtacccatttccatacttcgacatccttcgtaaatctttattagtaagatggaatgaaccggtggtggagtgacgagttgttcaattgctcgccaactctcgccactacaatttagagaaatacgaaaacgcgtcaagcgattgaggagggggaacggcgaaaaatgcgtcaaaatttgaagcagttaacgctattgccggggaatgtgacagccgtcgcggatagaagcgatagatgatagttatctatgatctattgtagatttgtgatgagcataacctctggtcatcgacaggcctccgcctgttggcaacagcaaccgatgatgaacactgacgatgagtaagagagattggctggacttcgagcacctggttgacgacgaagttcgtgatgcgattaaaccgccatctatgtataaagtgatattggtcaatgatgactacactccgatggagtttgttattgacgtgttacaaaaattcttttcttatgatgttgaacgtgcaacgcaactgatgctcacggttcactatgaaggtaaggcgatttgtggcgtgtttaccgcggaagtggcggagaccaaagtcgctatggtgaatcagtacgcgagggagaacgagcatccattgctgtgtacgctggaaaaagcctgaatacaggcatgaaaattgggggaggtgcctatgctcaatcaagaactggaactcagtttaaatatggctttcgccagagcgcgcgagcaccgtcatgagtttatgaccgtcgagcacttgctgctggctctgctaagcaacccctcggcccgtgaggccctggaagcgtgttcagtggacctggtggcattgcgtcaggaacttgaagccttcatcgaacaaaccacacccgttctgccagccacggaagaagagcgcgacacccagccgacgctaagcttccagcgtgtgctgcagcgcgccgtcttccacgtacaatcttctggccgcagcgaagtgaccggcgccaacgtgctggtggcgattttcagcgagcaggagtcgcaggccgcctacctgctgcgtaaacatgaagtgagccgtcttgatgtggtgaacttcatttctcatggtacacgcaaagacgagccgagccagtcttccgataacagcggaagccagcctggcaatgaagagcaagccggcggggaggaacgtatggaaaacttcaccaccaacctcaatcagcttgctcgcgtcggcggtattgatcccctgatcggccgtgaaaaagagctggagcgcgcgattcaggtcctgtgccgtcggcggaaaaataacccgctgctggtgggggaatccggcgtcggtaaaaccgcgatcgccgaaggccttgcctggcgtattgtgcagggcgatgtgccggaagtgatggccgactgcactatctactcgctcgacattggctctttgctggcagggaccaaatatcgtggcgattttgaaaaacgcttcaaagcgttgctcaaacagctggagcaggataccaacagcatcctgtttattgatgaaatccacaccattatcggtgcgggggcggcgtctggcggccaggtcgatgcggctaacctgatcaaaccgctgctttccagcggcaagatccgggtgatcggctccaccacttaccaggagttcagcaacatctttgaaaaagatcgtgcgctggcccgccgtttccagaagatcgatattaccgaaccgtcggtggaagagacggtccagattatcaacggcctgaagccgaagtacgaagcgcaccatgatgtgcgttataccgccaaagcggtgcgtgcggcggttgaactggcggtgaaatacattaacgatcgtcatctgccggataaggcgattgacgtcattgacgaagcgggcgcgcgggcgcgcttaatgccggtcagcaagcgtaagaaaacggttaacgtggcggatatcgaatcagtggtggcgcgcattgcgcggatccctgagaagagcgtctcccgcagcgatcgcgacacgctgaaaaacctgggcgatcgtctgaaaatgctggtttttggacaggataaagccatcgaggcgctgaccgaggctattaaaatggcgcgcgccgggctgggccatgagcacaagccggtgggatcattcctgttcgccgggccgaccggggtcgggaaaaccgaagtgaccgtccagctggcgaaggcgttgggtattgagctgctgcgctttgacatgtccgaatatatggaacgtcataccgtcagccgtttgatcggggcgcctccgggctacgtcggcttcgatcagggcgggctgctgaccgatgcggtgattaaacatccgcacgcggtattgctgcttgatgagatcgaaaaagcgcatccggacgtgttcaacctgctgctgcaggtgatggataacgggacgctgaccgataataacggccgtaaagcggacttccgcaacgtggtgctggtgatgaccaccaacgccggggtgcgcgaaaccgagcgtaaatccattggccttattcagcaggacaacagtccggatgcgatggatgagatcaaaaagatctttacgccggagttccgtaaccgcctcgacaacatcatctggttcgatcatttgtctaccacggtgatccatcaggttgtcgacaagtttatcgtcgagctgcaggtccagctggaccagaaaggcgtctccctggaagtgagtcaggaagcgcgcgactggctggcgacgaaaggctacgatcgggcgatgggggcacgtccaatgggacgcgtcattcaggacaacctgaaaaaaccgctggcgaacgagctgctgtttggctcgctggtcgacggtggtcaggtcactgtctctctggacagcgacaaaaatacgctgacttacgacttccagagcgcgccgaagcacaaaccggaagcggcccactaaggcgatatcttcaatgtaaaaaaccggccaggggccggtttttttttgctgacggcagaaatgaaaagaccgggaattatcccggccttcagcatctgacgccttaggggcgaaaacaatcagcgactacggaagacaatgcggcctttgctcaggtcgtacggggtcagctcaacagtcactttgtcgcccgtcagaatgcggatgtagtttttacgcattttaccggagatatgcgcggttaccacgtgaccgttttccagttctacgcggaacatagtgttaggcaacgtttcaagtacggtgccctgcatttcaatattgtcttctttggccatctagtcctctggggtatcactaccgtagttttgaaccggcaagataatgccgaagttcatcatgtaagtaaagttttacgtatctaccctgaatcattcaccttgccgcaaggcgcatagtcagcgcagcggctacggaaatatgacgggtatgaatcgccgaagtagttttggcgcattgcccgggacacacacggccatgccgcgtgacaggcgcaaacgtaaaggggagtgacagaacgatgggcgttatctgactcttattattcccaaacggcggcggggcaacaggcagaagctactctaccgcgcaattataccatcctgacgcaaaatgtgctgaaaacattttattatccgccaggaaatagcacccgcggcacccaaaatcgctcgggcagtcggtagccgcgtaataccgacagatagtccagataatcgcggcggggaatatccactgcgcctaatgacgcggtatggttgttcagtacctggcagtcaattaatttaccgccgctgtgcgcaaagtcctggcaaaataccagcagcgcggttttggaggcattttctgcccggctaaacatcgattcgccgcaaaacagcgctccctgcgctacgccgtacattcctcccaccagggtattctcctgccagacttcaatggagtgggcatgacccagctcatgcagctggtgataggcgcgaacgatactgctggttatccaggtgccttcgtcacgatcgctggcgcagccctcaatcacttcgccaaaggcgtggttgagcgtgacccggtagggcgaacgctgatgaaagcgcttcatgctgcggctgagatggaattgctctggccaaagtaccgcccgggggtcgggcgaccaccagaggatcgggtcgccaggggaaaaccagggaaaaataccacgctgataggccatcagcagccgcgcggggctcagatcgccgccgagcgccagcaggccattaggttctcgcaaggcgccttccggagaggggaaggcaatagagtgccgggagagctgaaccagacgcattttaacctcaatacgtatcagcaaaaattagataatagaatagcctacagacgctgtttaaactggaagtaccggccctgtttagcgagcagctccgcgtgactaccttgctcaattatctggccgttgtccatgactattatctgattaaaacccgccaggccccgcaggcgatgggtcaccatcagcacggttttgtcgcgcatgacatctgccagcagatgcaggatctggctttcggtggccgcatccagaccttctgtcggttcatcgagcagcatcagcggcgcatcgtggagcagcgcgcgggcaatggccagtcggcgcagttcgccgccggagagctgacgcccgccttcgcccagccagccgttaagaccaccatcttgcagcagtttttcgaggcccaccttctcaagggtagcgctgagatgagcatcatccgcttcaggcgccgccagcagcaggttgtcgcgcagggtggcgctgaacaggtgcacgcgctgcggcactacgctcattgcctgccgcagagtggcttcgctgaggccggagagcggctgattgttgagcagaatctctccctgtgacgggtcccaggcgcgggtaagcaactgcaacagcgtcgattttccgcagccggtccggccaagaatggcgatgtgctctccggcggcaatctgcagggaaatattctccagggcaggggagggctgctgaggatagcggaaggtgacctcccgaagcgttagggccacctgcgctggcaaactggcttcatcttcgacaaaggtgacctccggctgctggtcggtaatctgcgagatccgccgcgcggaggcgatcacctggcctaaatgctggaaagcgccagtaaccggcgccagggcttcaaaagccgccagcgcgcagaatacgaatagcgcgatcagcgccccgggctgactattgccgccgacgccgtctgaggccagccagagcatggccaccacggcgatgctaccgactaacagcattaccgcctgcgaaagcgcggtcagctcggcctggcgccgctgtgcatcctgccagctgagctcggtcttttccatttgtgcgcggtagcggtcgctggcgttaaataccatcagctccgcctgaccctgcagccaggcggtgagctgttggcgatactggccgcgcagctgcgtcatactttcgccggctggcttacctgcgcgatagaacagcggcggcataaccagcagggtcgccagcatgataccgccgagcgtcagcgcgagggtgacgtcgagcagacttaatccgcaggtgacgaccacaatcaccaccagcgcgccgaccagcggcgaaatgacccgcaggtagagatgatccagggtgtcaacgtcggccaccacccggttgagcagctcaccctggcgaaagcgcgccagccccgccggagagagggggagcagtttgctgaaggtgaaaacgcgcaggtgctgcagcacgcgaaaggtagcgtcgtggctgaccaggcgctcaaagtagcgcccggcggtacggataattgccgcgccgcgaacgcccgcggcaggcagcatatagttaaaactgtagatcccggcgacgcccaccaccgctgaagcggagaggaaccagccggagagcgtcagcaggccgatgctggccagcagggtcacaatggccagcacgacgccaagcagcagcatccatttatggcgtttatagagcgccagatagggtaaaagtgcgcgcatttaaatctcctcctgacgatgggccagcagcgccgagaagaccccaccagcacgggccagcgtggcatagtcgccttgttcgataatctgtccgtcctgcatcacccagacgtcgtcccagtcggccagcccctcgagctggtgggtgaccagcagcgtggtttgctcactggaggcgtgggtcagggcctgcatgactcgctgttcgctatgggcgtcaaggctggcggcaggttcatccagcagcagcaggcggcacggcaccaacagcgcgcgggcgaccgcgatacgctgcgcctggcctaccgacagacgccccgcctgatcgcctacggcggtatggatcccctgcggcagcagggcgataaactcgctgacccaggccttgtccagcgccagcctaagctgtgcttcgctagcttcgggccacgccagcagcacgttttcccgcagcgtggcggcaggcaactgcggattctgtcctacccagctcagcaggcggcgccagcgctcagcgtccagctcgcgcagctctacgccgttgaccatcagcgacccctcatagggcagaaagccgagcagtgtattcagcaaagagcttttcccggatccgctctggccgaccagcaccacgcgagcgccggcgggcagcgcaaaattaagcggccccgccagaactttaccttccggagatttgatcaccaggtcgcgcgcttccacgctaatcagatcgttgtcatttaacgttttctcgccacgctctacctgggtcagcggcgtttccataaacgttttcaggctgtctgcggcgcccacggcctgagctttggcatggtagaaggtacccaggtcacgtaacggctggaaaaattccggggcgaggatcagcgtcaggaatcccgccatcagcgtgacgcccgcgccatagtggccgaagttcagctcgccaaggtaagaaaagccaaaatacaccgctaccagcgcaatggagagggaggtgaaaaactccagaaccccggaggagaggaaggccagacgcaggacttccatggtgcgttggcgaaaatcctgcgaggcgtcgcgaatattatcggtttctgcctgaccgcgatgaaaaatacgcagggtttccatgccgcgcaggcggtcgaggaagtggccgctgaggcgggccagcgcctggaagttacgccggttggcgtcggcggcgcccatcccgaccagcgccatgaaaagcgggatcagcggggcggtgccgagaaggattagcgcggcggcccagttaatcggaaaaatagtaataacgatcagcagcggtacgcaggccgccagcgtcatctggggcaggtagcgggcataatagtcgtgcatgtcgtcgatttgctcaagaataagcgttgcccagctgccggccggtttgccctggatccacgccgggcctgcctgctggaggcggtcaagaacctggcggcgaatttcatagcgaatatgctgcccggcctgaaagccgacccgctcacgcagccagaccacccaggcgcgtagtacaaagatcagcaccagcagcgtgagcggcagcagcagggcggtcgctggaatattctccatcaccatccggtgcaggatccgcgccaggaaccaggcctgcgccacgatcagcagaccgctcgccacgccaagcaggcgggaaatcatcaaccagcgacgggagataatgctttgctgttttaaccagcgggttaactcttgttgacgggttttattcattgcgcgctttgcaggtgtcgttatcggagtattgggcacggcaatgttacatcgcagcaaaaataaaggcgacttttcgtcgccttctttacctttgttactgacttgtaaagattatttgcaagcgtcagccaaaccgtcgaggtaacgctccgcatccagcgccgccatgcagccggtgcccgcagaagtgatggcctgacgatagatatggtccatgacatcgccggcggcgaacacgcccgggatgctggtctgggtcgcattgccgtggataccggactgcactttgatgtagccgttctccagctccagctggccctcaaagatggcggtgttcgggctgtggccgatggcgacaaataaaccagccacttccagggactcgacattgtcgctgtttttggtatcgcgcaggcgcaggccgctgacgcccatctggtcgccggtcacctcttcgagggtacgatcggtatgcagcacgatgttgccgcttgccactttatccatcaggcgtttaatgaggattttttccgcacggaaggaatcgcgacggtggatcaggtgtacctcagaggcgatattcgacagatacagagcctcttccactgcggtgttgccgccgccgatcaccgccactttctggttgcgatagaagaatccgtcgcaggtagcgcacgcggaaacgccgcggcctttgaaggcttcttcggaaggcaggcccaggtaacgggcggaagcgccggtggcgatgatcagtgcgtcacaggtgtactcgccgctgtcgcctgtcagacggaacgggcggttttgcaaatcgacgcggctgatatggtcgaaaatgatctcggtttcaaattttgcggcatgctcgtgcatgcgctccatcagcagcggaccggtgagatcgttcggatcgcctggccagttttccacttccgtcgtggtggtcagctgaccgcctttttccatcccggtgatcagcaccggctgcaggttggcgcgtgcggcatagaccgccgcggtgtatcccgcaggtccagaaccaaggataagcagtttactgtgtttggctgtgcccatgagatccccataataattggcatacattgggctgggattgtagggaatttgttgtcgtaaaaaaagagcacagcgattttgttaacgatgtgtgcaatagaagctgccaatgaattggtgattttcccggcaaggaatataactatttctactgtcggcgggacaattataagacgaaaaaatgagaatcaaccagggcggatgatgaatatctggcatcttgtactaaaaatcgatgttttgctttgacaatcacctgtgcttttgcgaaaacattcaaggaagaagaaaagcagtatttagcgtgcggcgaattttcatgcacgcaaatgccatttttatccgggttaacgaaatctacgcatggtgtggacagacgccatgcgtgatgtcggtgactgccgtcaggcaacgggcttctcacgtacccctgggttacccaatgtcgtacgggtgataacaggatgggctctggcagtgaaggctcagagccggaacaggagtagggaaggaatacagagagacaataataatggtagatagcaagaagcgccctggcaaagatctcgaccgcattgatcgtaacatcctgaatgaattgcaaaaagatgggcgaatttctaacgtcgagctttctaaacgggtgggactttctccgacgccttgccttgagcgtgtgcgtcgtcttgaaagacagggttttattcagggctatacggcgctgctcaacccgcattatctggatgcatcacttctggtatttgttgagattactctgaatcgtggcgcaccggatgtgtttgagcaatttaacgccgcagtgcaaaaacttgaagaaattcaagagtgtcatctggtttccggtgatttcgactatctgttgaaaacccgtgtaccggatatgtcagcgtatcgtaaattactgggcgagaccttgctgcgcctgccgggcgttaacgacacccgtacctacgtggtaatggaagaagtcaagcaaagtaatcgtctggttattaagacgcgctaacacggaacaggtgcaaactcgacgtagtttgattacactcctgttaatccatacagcaacagtgccggggagacccggcgctgttgtccgttttagcagcaggcaggaaacagcctgatacctggagagcctttcttgagccaggaatacaccgaagacaaagaagtcaaactaaccaaactcagcagcgggcgccgactccttgaggcgatgctcatcctttgctccctcttcgccatctggctgatggcggcactactgagctttaacccctcggaccccagctggtcgcaaacggcatggcatgagcctattcataatttaggcggcgcccccggcgcgtggcttgccgataccctctttttcatttttggcgtcatggcctacaccatcccggtgatcatcatcggcggatgctggtttgcctggcggcatcaggaaaacgacgaatacattgattattttgccgtttcccttcgcctcatcggtgcgttagccctgatcctgacctcctgtggtctggcggcgattaacgccgatgatatctggtacttcgcctccggcggggtgatcggcagcctgctgagcaccacgctgcaacccctgctgcacagcagcggcggcaccatcgccctgttgtgtatctgggcggccgggctgacgctgttcaccggctggtcgtgggtcagcattgcggaaaagctgggcggcggcatcctgtccgttctcacctttgccagcaaccgtacccgtcgggatgatacctgggtcgatgaaggcgaatacgaagacgaagaggaagagtacgacgacgaagaggcggccaggccgcaggaatcgcgtcgcgcccgtatcttacgcagcgcgctggcgcggcgtaagcgtctggccgagaagtttaccaaccctatggggcgtaaaaccgacgctgcgcttttctccggcaaacggatggatgacggcgaagaagtggtgcaatacagcgccagcggggcgcctgttgccgccgacgatgtactgttttccggcgccagcgccgcgcgtcccgcagaggatgatgtgctgttctccggcgccagcgccgtgcgcccgggcgatttcgacccttacgatccgttgttgaatggccacagtatcgctgagccggtaagcgcagcggcggcggctactgccgcgccgcaggcgtgggcagaatcaccggtgggccatcacggcgctgcgccagcttatcagccggaagccagctatccgccgcagcaggcctatcagcctgaacccgctccgttccagcaggctgcttatcagccgccagcggggcaaaccgcaccgcaggcgtatcagcctgagccagcgccgtatcaacagccggtttacgatccgcgtgccggtcaacctgcgccgcaggcctatcagcctgagccagcgccgtatcagcagccggcttacgatccgtatgccggtcaacctgcgccgcaggcctatcagcctgagccagcgccgtatcagcagccggcttacgatccgcatgccggtcaacctgcgccgcaggcctatcagcctgagccagcgccgtatcagcagccggcttacgatccgcatgccggtcaacctgcgccgcaggcatatcagccggagccagcgccgtatcagcagccaacttacgattcctatgccggtcagcctgcgcctcagacctatcagcagccggcttacgatccgaatgccggtcagcccgcgccgcagacctaccagcagccggcttacgacccgcatgccggccagcccgcgccgcagccgtatcagccggagccagcggcgtatcagccgcaaagcgcgccagttcccccaccggagccagagcccgaggtcgtgcaggaggaagtgaaacgtccgccgctctattatttcgaggaagtggaagagaagcgggcgcgcgaacgcgagctgttggcctcctggtatcagccaattcctgagccggaaagtccgattgccactaaaccgctgacgccgccgaccactgcgtccaaaccgccagtggagacaaccgtagtctctgcggtagcggctggggtgcatcaggctaccgccgccagcggcggcgcggcggcagcaacctcgtccactgccgcatccgctgcggctacgccattgttcagcccggcgtccagcggcccacgggttcaggtgaaagaaggcatcggtccaaaactaccgcggcccaatcgtgtgcgtgttcctacgcgtcgggaactggcctcctacggcatcaagctaccgtcacagcgggaggcggaacagcgcgcgcggcaggcggagcgcgatccgcattatgatgatgagctgctctcggatgaggaagcggatgctatggagcaggatgaactggctcgccagttcgccgccacccagcagcagcgctacggtcatcgctgggaagacgataaggcgactgatgacgatgaggccgacgccgcggcggaagcggagctggcgcgtcagtttgccgctacccagcagcagcggtacgctaccgagcagccgccgggcgccaacccgttctcgccggcagattatgaattctcgccgatgaaaacgttggtcaatgacggcccgagcgaaccgctgtttacgccgacgccggaagtccagccgcagcagccggcccagcgctatcaacaaccggcggccgctccgcagcagggttatcaacctgcgcagcatcagccgatacaccatcagcctgtgccgccgcagccgcagtcctatccgactgcgtcgcagcccgtgcagccgcaacaaccggttgccccgcaggggcatcagcctgccgcccctgcgccgcaggagagcctgatccacccgctgctgatgcgcaatggcgatagtcgaccgctgcaaaagccgaccacgccactgccgtcgctggatctgcttaccccgccgccgagtgaagtcgagccggtggatacctttgctctcgagcagatggcacgcctggtggaagcgcgactcgccgatttccgcattaaagcggatgtggtgaactactcaccggggccggtgatcacccgcttcgaactgaatctggcgcctggcgttaaggccgcacggatctctaacctgtcacgggacctggcgcgatcgctgtcaacggtcgccgtgcgcgtggtggaggtgatcccgggcaaaccgtatgtcgggcttgagctgccgaataaaaaacgccagaccgtctacctgcgtgaagtgctcgacaacgccaagttccgtgataacccatctccgctcaccgtggtgttgggtaaagatatcgctggcgatccggtagtagccgatctggcgaaaatgccgcatctgctggtggccggtaccaccggttccggtaagtctgttggcgtcaacgccatgatcctcagcatgctctacaaggcgcagccggaagatgtgcgtttcattatgatcgacccgaaaatgctcgagctgtcggtctacgaaggaattccgcacctgctgacggaagtggtcaccgacatgaaagacgccgccaatgcgctgcgctggagcgtcaatgagatggagcgccgctacaagctgatgtcggcgctgggcgtgcgtaacctcgcgggctacaacgagaagatcgccgaagccgcgcgcatgggacgtccgatcccggatccgtactggaagcctggcgacagcatggacgccgtacatccggtgctggaaaaactgccgtacatcgtggtgctggtggatgaattcgccgatctgatgatgaccgtcggcaaaaaggtggaagagctgatcgctcgcctggcgcagaaagcgcgcgcggcggggatccacctggtgctggcgacacagcgtccgtcggtagatgttattaccggcctgattaaggccaacatcccgacgcgcatcgcctttaccgtgtcgagtaaaattgactcacgtaccattctcgatcagggcggcgcggaatcgctgctgggtatgggggatatgctttactccgggccgaactctaccacgccggtgcgtgtccacggggcgtttgtgcgcgaccaggaagtccacgccgtggttcaggactggaaagcccgcggtcgcccgcaatatgtggatggcattacctccgacagcgaaagcgaaggcggcggtggcggcttcgatggcggggaagagctggatccgttgttcgatcaggcagtcaactttgtgaccgagaagcgcaaagcgtcgatttccggggttcagcgtcagttccgcatcggctataaccgtgccgcgcgtattatcgaacagatggaagcgcagggtatcgtcagcgagcagggccataacggtaaccgcgaagtgctggcgccgccgccctttgaatgagtgcaaagttgggtaaataagcgcaaaatcagccaattcttctgtcccgccgccgccggcggtcctacagtaggggcagaagaggctcccgcgtcgggagtgacgcacattaaggaagaacaatgaaaaaactcgcaatcacctgtgcattactgtctggtatggtcgtcagccaggtctgggcagatgcggccagcgacttaaaaagccgtcttgataaagtgagcagcttccatgccagcttcacgcaaaaagtcaccgacggcagcggtaacgccgtgcaggacgggcagggagacctgtgggtgaaacgcccgaacctgtttaactggcatatgacccagccggatgagagcgtcctcgtttcggatggtaaaacgctgtggttctataacccgttcgtcgagcaggccacggcgacctggctgaaagacgccaccagcaacacgccgtttatgctgattgcccgcaaccagtccagcgactggcagcaatataatatcaagcaaaatggcgatgattttgtgctgacgccaaaaagcggcagcggcaacctcaagcagttcacgatcaacgtcggtcgggacggcactatccatcagttcagcgccgtcgagcaggatgatcagcgcagcagctatcagctgaaatcgcagcagaacggcgccgtcgacgcagctaagttcacctttacgccgccgaaaggggtgacggtggacgatcaacgtaagtagaggcgaaagtgagcaatctgtcgctcgatttttccgacaacgcgtttcaacctctggccgctcgcatgcggccagaaaatttagcgcagtatattggccagcagcacctgctggcgccgggtaaacccctgccgcgggccattgaggccgggcacctgcattcgatgatcctctgggggccgccgggtaccggcaagaccactctggcggaagtgattgcccgctacgccagcgccgatgtcgaacggatctcagcggtaacctccggggtgaaagagattcgcgaggctattgagcgcgcgcggcagaatcgcaacgccggccggcggaccatcctgtttgttgacgaagtgcatcgctttaataaaagccagcaggatgcctttctgccgcatattgaagacggtaccattacttttattggcgcgaccaccgaaaacccctcctttgagcttaactcggcgctgctctcccgcgctcgcgtctacttactgaaatcgctcaccaccgacgatatcgagcgggtgcttgaccaggcgatgaacgataaaacccgcggctacggcggccaggatatcattttgccggatgagacccgcagggccattgccgagctagtgaacggcgacgcgcggcgagcgctgaataccctggaaatgatggccgatatggccgaaagcgatgactcgggcaagcgggtgctgaaggcggaactgctgaccgagatcgctggcgagcgcagcgcgcgctttgataataaaggcgaccggttctacgatttgatttccgccctgcataagtcggtgcgcggtagcgcgccggatgcggcactttactggtacgcgcggatcatcaccgccggcggcgatccgctgtacgttgcccgccgctgtctggcgattgcctcggaagatgtcggcaacgccgacccgcgggcgatgcaggtcgccatttcggcgtgggactgctttacccgcgtcgggccggcggaaggcgaacgggcgattgcccaggccattgtctatctggcctgcgcgccgaaaagcaacgcggtgtacaccgccttcaaagcggcgctggccgacgcgcgggatcgtcctgactacgacgttccggtgcatctgcgcaatgcgccgacgaagctgatgaaagagatgggctacggccaggagtatcgttacgctcatgacgaacccaacgcctacgccgccggcgagcagtacttcccgcaggaaatggcgcaaacgcgctattatcacccgacaaaccgggggcttgagggcaaaattggcgaaaagctcgcctggctcgctgaacaggatcaaaatagcccgataaaacgctaccgctaattgaggcgttgcggtaaggttattacactatttccgtggtcgtagtctgcggccacttttcttttttaattcgataagcacaggataagcatgctcgatcccaatctgctgcgtaccgagccagacgcagtcgcagaaaaactggcacgccggggctttaagctggatgtagataaacttcgcgcgcttgaagagcgtcgtaaagttctgcaggtgcaaacggaaaacctgcaggcggagcgtaactcccgatcgaaatccattggccaggcgaaagcgcgcggggaagacatcgagccattacgcctggaagttaacaagcttggcgaacaactggatgctgcaaaatccgagctggaaacgctgctggcggaaattcgcgatatcgcgctggcgatcccgaatattcctcatgatgatgtgccggttggtcgcgatgaaaacgacaacgttgaagttagccgctggggtacgccgcgtcagttcgattttgaggtgcgcgatcatgtgacgctgggtgaaatgcacggggggctggattttgccgccgccgttaagctcaccggctcgcgcttcgtggtgatgaaagggcagctggcccgtctgcaccgcgccctggcgcagttcatgctggatctgcacaccgaacagcatggctacagcgaaaactatgtcccgtacctggtaaaccaggacaccctgtatggcactggccagctgccgaaattcgccggcgacctgttccatacccgtccgctggaagaagaggctgacagcagcaactacgcgctgatcccgacggcggaagtgccgctgaccaacctggtgcgcgatgaaatcatcgacgaagacgatctgccgatcaaaatgaccgcccatacgccgtgcttccgctctgaagccggttcctatggccgcgacacccgcggtctgatccgtatgcaccagttcgataaagttgaaatggtgcagatcgtccgcccggaagactctatggccgcgctggaagagatgaccggtcacgccgagaaagtgctgcagctgctgggcctgccgtaccgtaaggtcgcgctgtgcaccggcgatatgggcttcagcgcctgcaaaacctatgacctcgaagtatgggttccggcgcaaaacacttatcgtgagatctcctcctgctccaacgtctgggatttccaggcgcgtcgtatgcaggctcgctgccgcagcaagtccgataagaagacccgtctcgttcataccctgaatggttctggcctggcagtaggtcgtaccctggtggcgctgatggaaaactatcagcaggctgatggccgtatcgagatcccggaagtgctgcgcccgtatatgcgcggcctcgaatatatcggctaaacttctcactccttcttttaaaagcgcctgcgggcgctttttttacgcccttattgataccgggcaataatccttttcgcgaatgcagtgatactccctttggattaaaccagcataaaaaaccaataatatcgcaaagcattatatatatgtctatataacgcttgtcagtttattgtgagcaaccaaagcgagtatccatgaaaattaaagcccctgatgctttactggctgctgaggtaagccgccgtggtctgatgaaaaccacggcaataggcggcctggcgctggccagcaacgcactaacgttaccttttacccgactgtcgcatgctgacgatacgccggcgcccgccagtgagaaggtggtctggagcgcctgcaccgtcaactgcggtagccgttgcccgctgcgcatgcacgtggtggatggcgcgattaaatacgtcgaaaccgataataccggtgatgataactatgacggtttgcaccaggtccgcgcctgcctgcgtgggcgttcaatgcgccgccgggtctataatccggaccgtctgaagtacccgatgaagcgcgttggtaaacgcggtgagggcaagttcgagcaaatcagctgggaagaggcgttggataccatcgccagcaatatgcagcggctgattaaagagtacggcaacgaatccatctatctgaactacggcaccggcacgctcggcgggacgctgacccgctcctggccgccggggaaaacgctgattgcccgtctgatgaactgctgcggtggctatctcaaccattatggcgactattcatcagcgcagattgctgccggtctgaattacacctacggcggctgggcggacggcaacagcccatcggatattgaaaacagtcagctggtggtgctgttcggcaataaccccggcgaaacgcggatgagcggcggcggggtgacgtactaccttgaacaggcgcggcagaaatccaatgcccggatgataatcatcgatccgcgctataccgacaccggcgccgggcgtgaagatgaatggatcccgattcgtccggggaccgatgcggcactggtttcgggcctcgcgtgggtgatgatcaccgagaatctggtcgatcagccgtttctcgataaatactgcgtgggatacgacgagaaaacgctgcccgccggtgcgccagccaatggtcattacaaagcttacattcttggccagggcactgacggtatcgccaaaacgccggagtgggcctcgacaattaccggtattccgcgcgaacgcattgttaaactggcgcgcgaaattgccaccgccaaaccggcctatattagccagggctggggtccgcagcgtcacgccaacggtgagatcgccacccgcgccatctcaatgctcgccattctgacgggtaacgtcgggatcaacggcggcaatagcggggcgcgcgagggctcgtatagtttgccttttgagcgtatgccgacgctggagaatccggttgagaccagtatctcgatgtttatgtggaccgatgcgattgagcgcggcccggaaatgaccgctctgcgcgacggcgtacgcggtaaagataagctcgacgtgccgatcaaaatgatctggaactatgcgggcaactgtctgattaaccagcattctgagatcaaccggacccacgaaatcctgcaggacgacaagaaatgcgagatgattgtggtcattgactgccatatgacctcctcggcgaaatacgctgatattctgctgccggactgtaccgcctccgagcagatggatttcgcgctggatgcctcctgcggcaacatgtcctacgttatctttgccgatcaggccatcaagccgcgctttgaatgcaaaaccatctatgagatgaccagcgaactggcaaagcgtctgggcgtcgaagagcagtttaccgagggccgtacccaggaaggctggatgcgctatctgtatgagcagtcgcgcaaagcgattcccgacctgccggatttcgacaccttccgtcagcagggcatctataagcagcgcgatccgcaaggtcatcatgtggcctacaaagccttccgtgaggatccgcaggctaatccgctgaccacgccttcgggcaagatcgaaatttactcgcaggatctggcgaaaatcgcggccacctgggagctgccggaaggggatgttatcgatccgctgccgatctacaccccgggtttcgaaaactacaacgatccgctgacagcgaaatacccgctacagctcaccggcttccactataaatctcgcgtccactcgacctacggcaacgtcgatgtgctgaaggccgcctgtcggcaggagatgtggattaacccgatcgatgcccgcaagcgcggcattgccaacggcgatcgtattcgcatcttcaacgatcggggtgaagtgcatatcgaagcgaaggtgacgccgcgcatgatgccgggcgtcgtcgcgctgggggaaggggcctggtacaacccggacgcctcgcgtgtggatcaggcgggcagcatcaacgtgctgaccacccagcgtccgtcgccgctggcgaagggaaacccgtcgcataccaacctcgttcaggttgagaagctgtaaggagtaaccgatgacaactcagtatggattttttattgattccgcccgttgcaccggttgcaaaacctgcgaactggcctgtaaggactacaagaacctgaccccggaggtcagctttcgccgcatctatgaatatgccggcggcgactggcaggaggacaacggcgtctggcagcagaacgtgtttgcctattacctctccatcgcctgtaaccactgtgaagatccggcctgcaccaaggtctgtccgagcggcgcgatgcataagcgcgaagacggttttgtggtggtcaacgaagaggtatgcattggctgccgctactgccatatggcctgcccgtacggcgccccgcagtataacgccgacaaaggccatatgaccaagtgcgatggctgtcacgagcgcgtcgccgaggggaaaaagccgatctgcgtcgagtcctgcccgctgcgggcgttggatttcgggccgattgccgaactgcgcgctaagcacggccagctggccgcggtagcgccgctgtcgtcggcgcactttacccggccgagtatcgttatcaaacctaacgccaatgcccggccgtgtggcgataccaccggttacctggcgaacccgaaggaggtgtgagatgggaaacggatggcatgaatggccgctgatggtctttacggtattcggccagtgcgtcgtaggcggctttattgttctggcgctggcgctgatgacaggcaagctttcccgtgagcaggagcagcgcgtggtgggcagcatgctcggactgtgggtattgatggggatcgggtttattgcctcgacgatgcaccttggctcgccgctgcgggcctttaattcgctgaatcgcgtgggagcctcgtcgctgagtaatgaaatagccagcggggcgatcttcttcgccgtcggcggaattggctggctgctggccgtgtgcaaaaagctgcctgccggcctgcggagcctgtggctggtggtgaccatggtgctgggcgtgattttcgtgtggatgatggtgcgggtgtacaacaccatcgacacggtgccgacctggtacaccgtttggacaccgctgagcttcttcctgacgctgtttatcggcggtccactgctgggctacctgctgctgcgcgtcgcaggcgtcgatggttgggcgctgcgcctgctgccggtggttagtttgctggcgctgctggtcagtattatggtggtcgtgatgcagggaagtgaacttgccaccatccgcagctcagttcagcaggcctccgccctggtgccggattacgggttgcttatggcctggcgcgtggtgctgctggcgctggccctggcctgctggtgcgtgccgcagattcgcggccgcaaaccggcggtctcgctgctcggcctggcctttgttctgatactggcgggagagatgatcggccgcggcgtattctatggcctgcatatgaccgttgggatggctgtcgccagttaactacctccatcatgccggtgcctaaccaccggcatgatgaaaacgtgctgtcgatagatgaaatttttcaactgaaattaacttcggcatttattaataaaccagcaaaaacaatagcgtattatctgttgtctcacctttttccatcctctggataaaaaacttctatcgtagccgacaaaaccgcgtcacgcctgatttcaggtggattgacaatgtttttagcagtggcatgatgcgctcgcgatctgaacattcctcacggtttttacccatgaccatctacacccggccagtgcaaatgctgctctgtggcctgcttttattgaccctggcaatagcggtgctgaatacgctcgtcccgctctggctcgcccatgaaaacatgccaacctggcaggtcggcatggtggggtcatcctattttaccggcaacctggccggtacgttgctggccggctgggtgatcaagcgcctggggtttaaccgtagctattatctcgcatcgttaattttcgccgtcggctgcgtagggctggggatcaccgttggcttctggacatggctgagctggcgttttatcgccggcgtaggttgcgcgatgatctgggtggtggtggaaagcgcgctggtttgcagcggcacttcccgcagtcgcggtcgtctgctggcggcgtacatgatggtctattacgtcggtaccgtactgggccagctgatggtcagtaaattacccaccgatttaatgagcgtcctgccgtgggtgaccggcctggcgctggcggcgatcctgccgttgctgtttacccgcattatggggcaggcagaagaaccgcatgaaacggtacgtatctggccgatgctgaagctgcgccaggcgcgccacggggtcaatggctgtattatttcggggattgtcctcggctcgctgtatggcctgatgccgctgtggctgaaccatcagggcgtcagcgactccggcatcggcttctggatggcggtgatggtgagtgcggggatccttggccagtggccggtagggcgcctggcagaccgctacggtcgcctgctggtgctgcgggtacaggtctttgtggtcattctgggatgtctggcgatgcttagtcaggcggcaatggccccggcgctgtttgtgcttggggcatctggtttcacgctgtatccggtggcgatggcctgggcctgtgaaaaagtggagcaccatcagctggtggcgatgaatcaggcgctgctgatgagctataccatcggcagcctgctgggcccgaccctgacggcgatgctgatgcagaacttctcagacaacctgctgtttatcatgatcgccagcgtgtcgtttatctatctgctgaccctgctgcgcaaagccgggcatcatccgacgccggtggcgcacgcctgaccctgcaacgcgcagcgcatgctgcgcgtcatctgctgcaatcgcataggcttactgccgcagagaggacaagtcgtttttcatgagaatgaaacggcggggcggacacagcttcccacgccgttgcaggccggcataagcgcatcaccggcccgggcgggattagtacattactttgtgaccatactgctcaaggatgccttttacccgctccatggtctctttcttcggcggatggacgccgtccagcttgtactcttcgcccatcgctacccatttgtgtttacccagctcatggtagggcagcagctcgattttttcgacattgcccatatcgcgggtaaattcgcccaggcggtgcgcggaatcatcatcgtctgaccagccgggaaccaccacgtagcggatccagacattgatattcttcttcgccagatactgggcgaattccagcgtacgatggttagagacgccgaccaggttctggtgaatctcatcgttcatctgcttgagatccagcatcaccaggtctgttacctccagcagctcgtcgataaccggatcgtagcgacgtacgaagccgttggtatccaggcaggtgtggatgccttctttcttacacgcgcggaaccagtcgcgaacaaactccgcctgcaggatcgcctcaccgcccgaggcggtgacgccgccgccggaagcattcataaagtgacgataggtcaccacctctttcattaattcttcaacggtgatttctttgccgccgtgggtatcccaggtgtcacggttatggcagtacaggcagcgcatcaggcagccctggaaaaaggtaataaagcggatgcccgggccatcaacggtgccacaggattcaaaggagtgaatgcgaccaataactgacattgcggtgttttctccagatgtggcccatccggggccgtgttggtgcgcagctcagcggctgcgtcgagtctgttttgacaggtacccaaagtatagataactggcaaagcaggctggggcggggaatgcttgttaaaaaggccccactgatgtggggcctttattgtacgccttttcagtcagacagggaattacatggtctgagtgaaggtacgggtaataacatcctgctgctgttctttggtcagggagttaaaacgtacggcgtagccagatacgcggatggtcagctgcggatatttttccgggttttccatcgcgtcgagcagcatttcgcggttcatgacgttcacgttcaggtgctgaccaccttcgatggacgcttcgtgatggaagtaaccatccatcagacccgccaggttggtcttacgaacttcgtcgtctttacccagcgcgttcggcacgatagagaaggtataagagataccatctttcgcgtaagcaaacggcagtttagcgacggaggtcagagaggctactgcgcctttctggtcacggccgtgcatcgggttagcacctggaccgaacggcgcgccagcgcgacgaccgtctggggtgttaccggttttcttaccgtacaccacgttagaggtgatggtcagaacagactgagtcgggatagcgttgcggtaggtgtgcagtttctgaattttcttcatgaaacgttcaaccaggtcaacggccatgtcatcgacgcgagggtcgttgttaccaaactgcgggtattcgccttcgatttcgaagtcgatagccagaccgtcttcgtcacgaatcggtttaactttcgcatatttgatagcagacagggagtcagcagcaacggacagaccagcgataccacacgccatggtgcggataacgtcacggtcgtgcagcgccatcagagaggcttcgtagctgtacttgtcgtgcatgtagtggatgatgttcagcgcggtgacgtactgtttagccagccagtccatgaagtgatccatgcgatccattacttcgtcgaagttcaggacgtcgcctttgatcggttcagatttcggaccaacctgcattttcagtttttcatccacgccgccgttgatagcgtacagcatggttttcgcgaggttagcgcgagcgccgaagaactgcatttgcttaccaacaaccatcgggcttacgcagcatgcgatagcgtagtcgtcgttgttgaagtccggacgcatcaggtcatcgttctcatactgcagagaagaggtatcgatggacactttagcggcgaatttcttgaagctcagcggcagtttttcagaccacaggatagtaatgttcggctccggagacggccccatggtgtacagggtgttcaggaagcggaagctgtttttggtcaccagagtacggccgtcaacgcccataccgccgatggattccgttgcccaaatcgggtcgccggagaacagttcatcatattccggggtacgcaggaagcgaaccatacgcagtttcatgaccaggtggtcaaccatttcctgcgcgtcttgctcggtgattttacccgcctgcaggtcacgctcgatgtagatatccaggaagctggaggtacgaccgaaggacattgccgcgccgttctgagatttcacggcagccaggtaaccgaagtaggtccactgaatcgcttcctgagcggtggtcgccggaccagagatgtcatagccatatttagcggccatctctttgatctggcccagtgcgcggtgttgttcagcgatttcttcacgcagacggatggtcgcttccaggtcttcgccgctttccagtttcgcttgcagagagttgaactgggcgaatttgtctttcatcaggaagtcgataccgtacagcgcaacgcgacggtagtcaccgatgatacgaccacgaccgtaagcgtccggcagacccgtcagcacgccggatttacggcagcgcaggatgtccggggtatagacgtcgaaaacgccctggttgtgagttttacggtactctgtgaagatttttttcagcatcgggtccagctcgcgattatacgctttgcaggaaccttcaaccattttgataccaccgaacgggatgatcgcacgtttcagcggcgcttcggtctgcagaccaacgattttttccagacctttctcgatatagcccgcgtcgtgagaggtgatggtggaagccagggcagtgtcaaaatcaacaggcgcgtgagtgcggttttcctgttttacaccttccattacggtgtcccacagcttggtggtcgcttcagtcgcgccagccaggaaggattcgtcgccttcatatggggtgtagtttttctgaataaagtcacggacgttgacttcattctgccagtcacctttcgcaaaaccttcccaggctgtggctaacttttcattaagctcggacatgtaacacctaccttcttaagtggattttttatttactgcctgaaacaacccttagtgatggtcgttgccacgcaggtaaatgacccagtatgtcaacccgaccagcagacccccgccgataatgttcccgatagttaccggaatcaggttatcagtgatgaagttcataacggtcaagtgagagaaactttccggagtcgaaccgatggcggtccagaattccgggcttgcaaagttgcggattacgatacccatcgggatcataaacatgttggcgatgctgtgctcaaagccgctggcaacgaacatcgctaccggcaggaccatgatcatcgctttatccatcaggctacgaccggaatagctcatccatacggcgagacaaaccatcaggttagcgaggatacccaggctcacggcctccacaaaagtatggtgcattttgtggtcggcggtctgcagaacgtttagcccccagccgccgttggcagtcatatattcgcctgataaccacatcagcagcacaaacagcagcgcgcccaccaggttaccaaaatagacgttgagccagttttttgccagttgcccccaggtaattcgaccgctggctttggccaccacgatcagtaccgtagaggtaaagaggtcagcgccgcagataacgcacagaatcagacccagagaaaaacagatcccaccgataagtttggcaatcccataaggcatcgcggcagtgccggtggtcgcggtgatatagaatacgaaagcgatggagatgaaaacgccagcggtgatcgccagataaaacgtcttcatcggatgcttcgttgctttatagacacctgcttcttcggcgactttcgccatcgcggcagggagcaaaagatcaaaagggttgtcagctttcacactaactctctctttatataagttggcggtgagatactaacaaagcattatagaagggaaattgatatagatcatatctcaccggaactatatgcctttttagtgtgtggtttttattgaaattatcagtaagccaatgaaatgtatagagaaaataatttttaaattttatagataatgttgaattttttcttttttacccccatttttgagttaattaaaatggagtatttttattaaatttaacaattgataaatgatgaaatggcgttatttaacattaattaactttacaactacaaattataggaggcgctttctcagggttaaataacggagccgctgagggctccgttgtaagcatgaacgatggcgcaagctgggcttattttgcccaaaacgccgctttcgcccgctgcagtttttcataggctttcagcagcgactgatgggccgggaaggcctgcagatcgctatcgaccgcctggagaccatagaacggcgcttccccgctcagcgccgcgctggcggcttcgaccgcgtcggcgccgtacatacggatgaaggcgttcaggtactgcagcggctgacgctcttcttcctggctcagcagcagcagggtttgcagacagcgatagtagttcgcgcgctccgcgctgaagaccgaagcattgaattccatggtccactcggtccagatcagcgcctgttccagatcgccgccggccagggccagcatcgctttcagctcgccgacgcgcagggtataccagccgttgtcttttccggtggcgagccccagcagttcgcgaacgcgggtgaaatcatccagaccttcatcgtccatctgctcgatcagcgccaggtaatcttctttatcccactcgctgcccggcagggacagaatggtgtcccgcagatgagcgcccatgctgttgttcgccagccacaggtcttccgccgggtatatgtccgacatccccgggacgatgatacggcaggcgtaaacgcccaggtgctcgtagtcggcgatgtacacttctttatcttcggccttgaagatggccatcagggtggcgaactcttcttcggtagtaccagagaagctccagtcaacgaatggatagtcggcgtcctgcttgaacatatcccaggagatcaggccgctggagtcgataaagtgggtttcgaggttcgcgtgctcggcgacctcttcgtcatcgaaggttggcggcgtgaagacgtcgaggtctttcaggctgcggccctgcagcagttcggtgacggttcgctccagcgccacgccaaagtccgggtgggcgccgaaggaggcgaagcaggtgccgttagccgggttaaacagcacgacgcagataaccggatatttgccgccgagcgagccatcataggcaaagatcgggaaaccttcagcttccagtttggcgatcgattccacgacgcccggatagcgcgccatgacttccgccgggatctccggcaggctgatgctttcagcgatgatgcggtttttaatgtgacgttcaaagacctctgacagaccctgtacccgcgcttcgttgcgggtgttaccggcggacatgccgttggagacgtacaggttgccgacaatattcatcggaatatagacggtttcgccgtcggactggcgggtaaaaggcagaccgcacacgccgcgctcatcgttacccgactgcagatccaccagcatactggccgttaactgatcgtcaggatcgtagaacgcgcgcaggcgggcatccagcagaccttccgggacttcatcatcctcagtcagcgggaaccacttttcgttcgggtagtgaacaaacgggccgttagcgatagtgtcgcctaaccagaagtcggcgaagaaatagttagtggacagacgttcgaaatattcgcccagcgcggaggccagggctgcctttttggtggcgcctttaccattggtaaagcacagcgcgcacgctttatcgcgaatgtgaacggaccacacgtgcggcaccgggttcagccacgaggcctcttcgatatcaaatccgaggtcgagcaatttctgctggaagcgagcgatggaatcttccagggcggcatctttgccgggaataaacgtttgggtcatggcgatcacttttgtcgtacggaaagcgcgcaatgatacggcttttatctgacaggtgctatctccatcatctggctatgcttagaggcatctttaatacacagggagatggaaaatgaaagcctttgactggcagcggatggcgctcgataaagtaccggtggaattcctggcggaggtggcgttgcgcagcctctataccttcgttctggtctttattttcctcaagattaccggacggcgcggcgtgcggcagatgtcgctgttcgaggtgctgattattctgaccctcggttcggcggcaggggacgtggcgttttatgacgatgtaccgctgctgccggtgctggtggtcttcgttacgctggcgctactgtatcgcggcattatgtggctgatggggcatagcgaaaagctggaggatctactggaggggaaacctatcgtagtggtggaagagggacagttggcctgggagaagctgcatgcggaaaacatgaccgaattcgaattttttatggagctgcgggtcaacagcgtcgagcagcttggccaggtccggctggcaatcctcgaaaccaacgggcagatcagcgtgttttattatcccgatgaagaggtgagggccggattatcgatccttccagcgcattgtaccacacgctataccaccattccgcaagaggggatctatgcctgcgtgcgctgcagcatcgtaatggcgatgcaggcgggagaaaaacgaatatgtccgcgctgcgcaaatgcagaatggtcgaaggccagccgggcgaaacggcttacctgacagcaaatatgtcggttttattacgtcaagccgatagattctgttgtgtgacggcggccgcgttttaccgtcggcgagttttagccattgcggaccttgtcactgaatgataaaaccgatagccacaggaataacttatgcccgcggcggttcgcgggcaaaacaacatagcaacgtggtgaggggaaatggctcaggtctataacttcagttcgggcccggcaatgctgccggcggaagtactcaaactggcgcagcaggaactgtgcgactggcacggtctggggacgtcggtcatggagatcagtcaccgtggtaaggagtttatccaggtggcagaagaggcagaacaggacttccgcgctctgctgaacatcccttccaactataaagttttattctgccacggcggcggccgcggccagttcgccgggatcccgctgaacatcctcggcgataaaaaggtcgctgactatgtggacgccggttactgggcggccagcgcggtcaaagaggcgaagaaatactgcacgccgaacgttatcgatgcgaaaatcaccgtcgacggcaagcgcgctgtgaagccgatgagcgagtggcagctgaccccgggagcggcctatctgcactactgcccgaacgaaaccattgacggtatcgcgattgatgagacgccgaacttcggcgacgacgtcatcgtgaccgccgatttctcctccaccattctttcccgcgaaattgacgtcaaccgcttcggcgtaatctacgccggcgcgcagaagaatatcggtccggctgggctgacgctggtcatcgtgcgtgaagatctgctgggcaaagccagcgtggcctgcccgtcaattcttgactacaccgtgttaagcgagaatgactcgatgtttaacacaccgccgacgttcgcatggtatctggctggactggtgtttaagtggctgaagcagcagggcggggttgccgcgatggataaaatcaaccagcagaaagccgaactgctctacggcgtgatcgataacagcggcttctatcgtaacgatgtggcgcaggccaaccgttcgcgtatgaacgtaccgttccagctggcggacagcgccctggacaaactgttcctcgaagagtcgtttgctgccgggctgcacgcgctgaagggccaccgggtggtgggcggcatgcgtgcttccatctacaacgccatgccgctggacggcgtgaagacgttaaccgactttatgctggacttcgaacgccgccacggttaatcgcctgtttctttcttcctccccgcggcctgtctgcggggtttttattctgtttgtttgagagtgaagtttgatggaatccctgacgttacaacccatcgcacgcgtagagggcaccgtgaacctgccaggttcgaaaagcgtctccaaccgcgcgctgctgctggctgccctggcccgcggcacgacggtgctgaccaacctgctggacagcgacgatgtgcgccatatgctgaatgccctgagtgcgctgggggttcaatataccctgtctgccgaccgcacccgctgcgaagtgaccggcaacggcggcccgttgcgctctgccgcggcgctggagctgttccttggcaacgccggtaccgcgatgcgtccgctggcggcggctctgtgccttggcagcaacgatatcgtgctgaccggcgaaccgcggatgaaagagcgtccgatcggccatctggtggatgccctgcgtcagggcggcgctcagatcgactgtctggagcaggaaaattatccaccgctgcgcctgcgcggcggttttcagggcggcaacgtcgaggttgacggcagcgtctccagccagttcctgaccgcgctgctgatgaccgcgccgctggcgccgcaggataccgtcatcgtcattaagggcgatctggtgtcgaaaccctatatcgacattacgctgcacctgatgaaaaccttcggcgttgaggtggacaatcagtcttatcagcgatttgtggtgcgcggcaagcagcagtatcagtcgccgggagattacctggtggaaggcgatgcttcctcggcctcgtatttcctcgccgctggcgccattaagggcggcacggtaaaagtcaccggtatcggccgcaacagcgtacagggcgacatccgtttcgccgacgtactggagaaaatgggcgccaccgtcacctggggcgacgatttcatcgcctgcacccacggcgagctcaaggcggtcgatatggatatgaaccatatcccggacgccgcgatgaccatcgccaccgccgcgctgttcgcgcaagggaccactaccctgcgcaatatctacaactggcgggtcaaggagacggaccgtctgttcgccatggcgaccgagctgcgtaaagtgggcgccgaggtggaagagggggaagattatatccgcatcaccccgccggcaaagttgaagtacgcagaaatcggcacctataacgaccaccggatggcgatgtgcttctcgctggtagcgctgtctgatacgccggtgaccatccttgatcccaaatgtacggccaaaacgttccctgactactttgagcagctggcgcggatcagtaccctcgcctgagtaaaactttgtcatcccgcgggctgatgtcctgtcagcccgctataattgcgcaaaacttctgcttttcatttcctgtagtccgtaatttacaagcaatgctcactttccggcgtattgatgcgtataatgcgcggcgtttatattccatgcgccttgctgaaggagaaaaagatgacggcgaatattccggtaatcaccattgatgggcctggcggtgcgggtaaaggtacgttgtgcaaggcaatggcggaagcgctgggctggcatctgttagattcaggcgcgatctaccgcgttctggcgctggcggcgctgcatcatcatgtcgacgtggagtccgaagaggcgctggtgcccctggctgcccatcttgacgtgcgttttatttctactgacggcaacctggaagtggtgctggaaggggaagatgtcagtagcgaaattcgcactcaggaggtcgcgaacgcggcctcgaaagtggcggcttttccgcgcgttcgcgaagcgctgctgcgccgccagcgcgccttccgcgaactgccggggcttatcgccgacggtcgcgatatgggaacggtagttttcccggacgcgccggtgaaaattttcctcgatgcctcggccgatgagcgggcgcatcgccgcatgcgacagttgcaggaaaagggctttgatgttaactttgaacgtcttttgtccgagataaaagagcgtgacgatcgcgaccgaaatcgcgccgtggcgccgcttgtcccggctgccgatgcattagttctcgattcaaccgaactaaacattgagcaagtgattgaaaaagcgctacaatatgcgcgcgaaaaattggccgttgcgtaggccttaaccggtaacgcgccgaagcctccgaattatagcagtaccccgcggcaatggatggtcagcgggtatgtgaaacaaccccatccggcacggagccaggtggacgttaatattaacctgaagattaaacatgactgaatcttttgctcaactgtttgaagaatccttaaaagaaatcgaaacccgcccgggttccatcgttcgtggtgttgttgttgctatcgacaaagacgtagtactggttgacgccggtctgaaatctgagtccgccatcccggctgagcagttcaaaaacgcccagggcgagctggaaatccaggttggtgacgaagttgacgttgctctggatgcagtagaagacggcttcggtgaaactctgctgtcccgtgagaaagctaaacgtcacgaagcttggatcacgctggaaaaagcttacgaagacgctgaaactgttaccggtgttatcaacggcaaagttaaaggtggcttcactgttgagctgaacggtattcgtgcgttcctgccgggttccctggtagacgttcgtccggtgcgcgacacgctgcacctggaaggcaaagagcttgagttcaaagtcatcaagctggaccagaagcgtaacaacgttgttgtttctcgtcgtgccgttatcgaatccgaaaacagcgcagagcgcgatcagctgctggaaaacctgcaggaaggcatggaagtcaaaggtatcgttaagaacctcactgactacggtgcattcgttgatctgggcggcgttgacggcctgctgcacatcaccgatatggcctggaaacgcgttaagcatccgagcgaaatcgtaaacgttggcgacgaaatcactgttaaagtgctgaagttcgaccgcgagcgtacccgtgtatccctgggcctgaaacagctgggcgaagatccgtgggtagctatcgctaaacgttatccggaaggtaccaaactgaccggtcgcgtgaccaacctgaccgactacggctgcttcgttgaaatcgaagagggcgttgaaggcctggttcacgtttccgaaatggattggaccaacaaaaacatccacccgtccaaagttgttaacgttggcgacgttgtggaagtaatggttctggatatcgacgaagagcgtcgtcgtatctccctgggtctgaagcagtgcaaatctaacccatggcagcagttcgcggaaacccacaacaagggcgaccgtgttgaaggtaaaatcaagtctatcactgacttcggtatcttcatcggcctggacggcggcatcgacggcctggttcacctgtctgacatctcctggaacgttgcaggcgaagaagcagttcgtgaatacaaaaaaggcgacgaaatcgcagcagttgttctgcaggttgacgcagagcgtgagcgtatctccctgggcgttaaacagctcgcggaagatccgttcaacaactacgttgctctgaacaagaaaggcgctatcgttgttggtaaagtgactgcagttgacgctaaaggcgcaaccgtagaactggctgacggcgtagaaggttacctgcgtgcttctgaagcatcccgtgaccgcgttgaagacgcaactctggttctgagcgttggcgacgaagttgaagcgaaattcactggcgtggatcgtaagaaccgcgtagtgagcctgtctgtacgtgcgaaagacgaagcggaagaaaaagacgctatcgctaccgtgaacaagcaggaagacgcgaacttctccaacaacgctatggctgaagcgttcaaagcagcgaaaggcgagtaatctttgtcattcaggtaataacaacctgaatagcgacgagtttacttgacagattgcaggattcgtcctgtaatcaagcacaaagggcggctacggccgcccttgtttaagctgttagctaatttttgccttgaaggaaaccggaggaataatgaccaagtcagaattgattgaaagacttgccagccagcaatctcacattccggcgaaagcggtggaagatgctgttaaagaaatgctggaacatatggcctcaacgcttgctcaaggtgagcgcattgaaatccgcggtttcggcagcttttctctgcactatcgagcacctcgcaccggacgtaacccgaaaactggtgataaagtcgaactggaaggtaagtacgttccgcactttaagcccgggaaagaattacgtgaccgcgccaatatttatgaagggtgagttgcacgacgtgcagcctgcctgacgataaagaaagcaccttcgggtgctttttttgtgcccgccatttacggccatcctcacaaaaaaagcgtgcccggctgcaagcgaggcgattgtctggaatgcgccgcgcaaacctgaattcgccgccaggacgccagcaccgctttgcgtaacactgcccactcacagggaggtgtttatgcgtctaccatggcttgccggatgcgccatcattgcaatgctgccgcttctctggctacccgtcttgccgggcccgtgcagtctggcgggcgcgagcgcactggcgctggcgctgattcgtctgcatggaagggccgtcgccggagtggcgatgacgcttctgctggtggtctggggagtattgagcgcgcatcaggcgctgtggccgacccggcaccttaccggcgccatccggcaagcggaagtgatccttagcgagacggatggccagaccttgcaccgtggacagatggtgcgcctgcggggccgctatctgtttcccccggtaggcgtaacgctgtacggggaacttgcacctgcgccagcctgtgcgggtcaacactggctgatgacgctgcgcctgcgcccggtgcacgggcagctcaatgacgggggcttcgacagccagcgctatgcgctggcgcagcaccgaccgctgagcggagggatcgtcgccgcttccgcgctggatgcccgctgcagtctgcgcgcccgctatctgacgtcgctgacccggcgactgcagacttatccctggcgcgcggtgatgttgggattaggaatgggggagcggctgtctctgccgacggagataaaggtcctgatgcagaacacgggcacttcccatctgatggctatctcgggtctgcatatcgctctcgcggcttctcttatcatgctgttgctgcgcggcgtgcagtatattctcccgggccgctggattggctggcggttgccccttgtcgccgggctggcgggcgccgtcggctatgcctggctgaccggtatgcagccgccggccctgcgcacttgcttagggcttgcggtctgttgtgctttacgtttgtcgggtcaacgctggacggcgtggcaggtgtggctctgctgtctgggagcgatactggttgccgacccgctggcggtgctgtcgcaaagcctgtggctatctgccttcgccgtggcggggctgatcttctggttccagtggctcccgttgcctgccggccgctggcgctggccgtggaagaccataattgctcttgttcatttgcaggctggcgtgacgctgctgctgctgccgctgcagttgttgctattccatggagtcagcctgacgtcgatggcggctaatttgctggcggtaccgttagtcaccctgttggcggtgccgcttattctgaccgcgatgctggtgcatctctcggggccggatatagtggagtcgctactctggctggcggccgatcgcgtgctggcgctactgttttggggattacgacgtttaccggacggctggttgacgctggatgctcgctggctgtggatcagtatcctgccgtggctgttggtgatgggctggcgttttcagagctggcggcattcaccggcgctgtgtctcagcgtgctgtttttactgacgcggccattcagccgacaaccgcctgcggacgaatggcgggtgacgatgctggatgtcggacaggggctggcgatggtgatcgagcgtcacggtaaggcattgctttacgataccgggccggcttggccgcagggtgatagcggtcaacaggtgattatcccgtggctgcgctggcaccatctgcagttgcaagggattatgctgagccatgaacatctggatcatcgcggcggccttgattcagtgctgcaggcatggccgcaggcgtgggtgcgcagcccgttaggctgggcgcatcatctgccgtgtcatcgcggtgagcgctggcaatggcagggactcaacttccaggccctgtggccgctaccgggcagcacggcaaagggtaacaatcattcctgtgtggtgcggatcgatgatggtcgctccagcatcctgctcaccggcgatatagaacgtcaggcggagcaggcgatgatcagccgttactggcggcatctgacgtctacacttattcaggttccccaccacggcagcaatacctcctccagcgcgctgctggtccgccgggtggatggcgcggccgcgctggcctccgcttcgcgctacaatgcgtggcggatgccctcgtacaaggtggttcagcgctaccgccagcggggttatcgctggttcgccacgccgcagcaggggcagataacggtggttttttccgcagaagggtggcaaatccatagcttacgggatcaagttttaccgcgttggtatcatcagtggtttggcgcgcccgccgataacgggtagaatatgcggctatttcaacacaagctggtttattgaatgcagaacgataaagatctctccacgtggcagaccttccgccgactttggccgattatcgcgccgtttaaagccgggctaatcgtagcggcggtggcgttggtgcttaacgcgggcagtgacaccttcatgttatcgcttcttaaaccgttattggatgatggttttggtaaaacggatcgctcagtgctgctatggatgccgctggtggttatcggcctgatggtgctgcgtgggatcaccagctacatctcgagctattgtatttcctgggtttccggcaaagtggtgatgaccatgcgtcgtcgcctgttcggccacatgatgggtatgccggtggccttctttgacaagcagtctaccggaacgctgctgtcacgcatcacctatgattctgagcaggtcgcctcctcctcttccagcgcgctgatcaccgtggtccgcgaaggggcatcgattatcggtctgttcgtgatgatgttctattacagctggcagctgtcgctgatcctgatcgtactggcgccgattgtgtcggtggcgatccgcgtggtctccaagcgttttcgcaatatcagtaagaatatgcagaacacgatggggcaggtcaccaccagcgccgagcagatgctgaaagggcacaaagaggtgctgatgtttggcggccaggaagtggaaaccaaacgttttgataaagtcagcaataaaatgcgtctgcaggggatgaagatggtttccgcctcgtctatctccgacccgatcattcagcttatcgcctccctggcgctggcctttgtcctgtatgccgccagcttcccgagcgtgatggacaccctgaccgccgggaccattaccgtggtcttctcctcgatgattgcgctgatgcgtccgctgaagtcgctgaccaacgtcaatgcccagttccagcgcgggatggcggcgtgccagacgctgtttgcgatcctcgattccgagcaggaaaaagacgaaggtacgcgggtcattgagcgggcgaaaggcaatctcaagttcgagaacgtcacctttacctacccgggtcgcgaagtggccgcgctgcgcaatatcaatctcgatatcccggaagggaaaacagtggcgctggtggggcgctcagggtcgggtaaatcgaccattgccagcctgatcacccgcttctacgatgtcgacgaggggcagatcctgctggatggccacgacctgcgcgagtacaagctgagctcgctgcgcgaccaggtggcgctggtttcacaaaacgtgcatctgttcaacgataccgtcgccaacaatatcgcctatgcccgtaccgaagagtacagccgcgagcagattgaagaggccgcgcgcatggcctacgccatggatttcattaacaagatggataatggtctggataccatcatcggcgagaatggcgtgatgctgtccggcggccagcgccagcgtattgctattgcccgcgcgctgctgcgtaacagcccgatcctgatccttgatgaagccacctcggcgctggataccgagtccgagcgtgccattcaggcggcgctggatgagctgcagaaaaaccgtacctcgctggttatcgctcaccgtctgtcgaccattgagcaggctgatgaaatcgtggtggttgaagacgggcggatcgtggagcgcggaacgcaccatgatctgctggagcataagggcgtgtacgcccagctgcataagatgcaattcggcgaatgatcgcgcgcatctggtccggggaatcgccgctgtggcgcctgctgctgccgctctcctggctgtatggcctggtgagcggggtgattcgcctcagctatcagctggggtggcaaaaagcctggcgcgcgccggtgccggtggtggtggttggtaacctgaccgccggcggcaatggcaaaacgccggtggtgatctggctggtggagcagctgcagcagcgcggtattcgcgttggcgtcgtgtctcgcggctacggcggtaaagctgaacgctatccgctggtgttggacgacagaaccagtacggcgctggcgggtgatgaaccggtgttgatccatcagcgtaccggtgccccggtcgctgtcgctccgctacgcagcgacgcggtaaaagcattgctcagcgcgcacgatctgcagatgattgtgaccgacgacgggttgcagcactataagcttgcgcgggacagagaaattgtcgttattgacggcgtgcgccgctttggcaacggctggtggctgcctgccgggccgatgcgcgagcgggcgtcgcgcttgcaaagcgttgatgcggttatcgttaacggcggcgtggcgcgtccgggtgagatcccgatgcggctgcgcccagggatggcggttaacctgcttaccggcgaacgtcgcgatgtctccaccttcacgaacgtagtggcgatggccggcatcggccatccgccgcgcttcttcgccaccctcgaaagctgcggcgtccagccggtcaaaaccgtggcgctggcggaccatcaggcgctgagccaggctgatgtcgccgccctggtgaccgccgatcagacgctgctgatgaccgagaaagatgccgtgaaatgtcgcgatttcgccgctgcaaactggtggtatttaccggtcgacgccataatggccgatgaacgcgcacagcggttgcttgcggacttagcgacgttggcgcaacgttaactgacgcgccggctttgctcgccgctgtgctggaattcctgacggagaacctgcatgtcggtattgcaactatcgcttaacgaggcgcgccacctccatctcgcggcgcaggggttgttaaagaagccccgacgtcgcgctcgcccgaaagacattctttccaccatccagcagatgtcgctgctgcaaatcgataccatcaacgtggtggcccgcagcccctacctggtgctgttcagccgtcttggcagctatccgcagcactggctggatgagtcgctgcgcaacggcgagctaatggaatactgggcgcatgaagcctgctttctgccgcgcagcgatttcgccctggtgcgccatcgcatgttgaatcccgacaatatgggctggaaataccatcgcgcgtggatggaggagcatgccgggagtattgccgagctggtggcgcatatcgggcaaaacggcccggttcgctcggcggattttacccacccgcgcaaaggcgccagcggctggtgggagtggaaaccgcataagcgccacctggaagggctgtttaccgccggcgaagtgatggtggtggagcggcgcaattttcaccgcgtgtatgatctaacccggcgggtgatgccggactgggacgacgagcgcgacgcgctctcccgcgaagacgcagaggccattatgttgcgcaatagcgcccgtagtctcggcatcttccgcgcccagtggctggccgattactatcgcttgcgccagccgtcgctaccgggtctgctggcggcctggcaggaagaggggctggtggtgccggttaacgtggaagcactcggcgagatgtggctgcatcacgaggcgctggcgcagctggagaccgcgcccggcggtaagctgaccgccagccatagcgccgtgctctcgcccttcgacccggtggtctgggatcggaaacgcgctgagcagctgttcaacttcagctatcgcctggagtgttataccccggcgccgaagcgtcagtatggctacttcgtactgcctctgctgcaccagggaaaactggtcgggcggatggacagtaaaatacatcgcaaaagccgggagctggagatcttcgctctgtggctggaggagggggtgaagatcacccgtggtctggagcaggggctacgccgggcgattaacgacttcgcacgctggcaatcggcagagcggatcctgtgccgacgcctgccggaagggctgtttgtcggccaggagcaggggtgggaaatcgacgccgattgatcccggcgcctgccttcctgtgatatgctgctgagaaatctatccggtccatcaggaggaaacatggatcaccgtttacttgaaatcatcgcctgcccggtctgtaacggcaagctgtattacagtcaggataagcaagaacttatttgcaaacttgatagcctggcgtttccgctgcgcgacggtatcccggtgctgctggagacagaggcgcgtccgctggcgctagaagagagtcactcatgagtttcgtggtcattattcctgcgcgtttcgcctccacgcgcctgccgggaaaaccactgcaggacattaatggtaagccgatgattgtccatgtgctggagcgcgctcgcgaatccggcgcggatcgcattattgtcgccaccgatcacgaagatgtcgcccgggcggttgaagccgccggcggcgaggtctgtatgacccgcgccgaccatcagtccggcaccgaacggctggcggaagtggtggaaaagtgcgcgttcagcgatgacaccattatcgtcaatattcagggcgatgagccgatgatccccccggcgattgtccgccaggtggcggagaatctggctgccagcagcagcggaatggcgacgctggcggtaccgatccatgatgcggaagaggcgtttaacccgaatgcggtcaaagtggtgatggatgccaagggttacgcgctctatttctcccgcgcgactattccctgggatcgcgatcgctttgcccaatcccgcgagaccatcggtgactccctgctgcgtcacatcggcatctatggctatcgcgccggctttatccgccgctatgtcagctgggcgccgagcccgctggagcagattgaaatgctcgagcagctgcgagtgctgtggtatggcgagaaaatccatgtcgccgtggcggcggaagtgcccggcaccggcgtggataccccggaagatctggagcgcgtccgcgctgagctgcgttagtcctctgtcccctccttgctggaggggatatccccgtcggtttttcgctttttttacccctttttgatcttatccgatgacaacccaggtgcgggcgctcattatgaaaccagtagtgttcataggggtaatcgacaatggaacagttgcgaaccgaactcagtcatcttcttggcgaaaagctaagccgggtggagtgtgtcagtgaacaagccgctacggcgctgtggttcctgtacgatgcgcagggaaacccgatgccgctgctggcgcgaagtttcaccacgcccggcgtggcgcggcagctggcatggaagatctcgaccctggcgcgtaatggtacggtgcgtatgccggtggtttatggcgtcatgacgcacgaagaacatcccggaccagatgtgctgctgcttgagcgcctgcgcggcgtaccggtggaggcgccgacgcgcaccccggcgcgctgggagcaactgcaggagcaaatcgtcgaggggctgctggcgtggcatcggcaggacagtggcggctgcgtgggaatggtcgacaatacccaggaaaacctatggccgaactggtaccgccagcgggtagagatattgtggagcaccctgaacctgtatcaggacagcggtctcaccatgcaggataagcgccttttgttccgctcccgcgagtgccttccggagctgttccgcgatttcaatgataatgctgtgctggtgcatggcaacttcactctgcgcagcatgctaaaagatccgcgcagcgatcagctgctggcgatggtggggccggggatgatgttgtgggcgccacgcgagtatgaactgttccgccttgctgaaggcggccaggcggaacagctgctgtggcgctacctgcagcaggcgccagtttccgaggcctttgtctggcggcgctggctttatctgctgtgggatgaggtggatagtctggtcaacaccgggcgctttgatcgcgcccgttttgacctcgctgcaaaatcactcctgccctggctcgcctgagctgcctttcagccattgccagacgcgaccaagggtttcatagccgacccggtcgctgtgcatcagccacactggagaaggaatggcccgctcccacggattgagcggcgaggtcaccgccagctgattggccggcgcgggaagcggatccaggccggcatggcgaaagaatatcatcgcccgcggaaggtgtgacgccgaggtgaccagcaggaagggcgcgtcgccgatggcgcgcttcaccgccagcgcttcctcttctgtatctttcggccgatcgagcacaatgatatcgctgcgaggtacgccaaggctctccgccactctcgccccggcttccgctgtgctgacggggttcgttttcgccgccgcgccggtaaagatcattttcgaaccgggattcgcctgccacaggcggatgccctccgtcaggcgcggcaggctgttattgataagattagagcttggcgcccactccggattccaggtatagccgccgcccagcaccaccacgtagttcaccggctgctcgccgcgccaggtggggtaggtatcttcaatcggtttcagcaggctgtcggccacgggctgcaggctcagcagcgtcagcagcagccagccgaggctcacgcatagctttccggtacgctgaaagcggctgaaccataacagcgcgatcccgataccgatcagcaacagtaaggcgggtagcggcaacagcaggccgccgacgatcttttttagcgtgaaaagcatgccagatggttccttttttaaccatataaccaaagttatgttcggatcttataacagatcgcttcattctcggcgcgggtatgacaaaatagcggttttgtgttggcttgtggagtcactcgtgcaggatcgcaatttcgatgacattgctgaaaagttttcgcgcaatatttacggcaccacaaaaggccagttgcgtcaggcgatcctctggcaggatctggaaccgctgttggcgcagctggggccgggaccgctgagggtgctggatgccggcggcggcgaagggcaaacggccatcaaagtcgcgcaactgggccatcacgtgacgctgtgcgatctctccgctgagatggtggctcgcgcccgccaggcggccgccgataaaggtgtgatcgacaacatgcattttgtacaatgcgcggctcaggatattgcgcagcatttggaaagcccggtcgatctggtactgtttcatgcggtgctggagtgggtggcggagccccaggaaatactgcataccctgtggtcgacgctgcgtgctggcggtggactgtcattgatgttctacaatgctaacggcctgttgatgcacaatatggttgccggtaattttgattacgttcaactgggcatgccaaaaaagaaaaaacgcacgctgtcgccggattatccgcgtgaaccacagcaggtttatcactggctggaagagattggctggcagatcgtcagcaaaaccggcgtgcgggtgtttcatgattatctgcgtgaaaaacgccaacagcatgacagctatgcggcgctgctggcgctggagacgcgctactgtcgtcaggagccgtatctcagcctgggccgttatattcatgtcaccgcgcttaagagccaggctcatagccgcagatgcaaggataaagtatgagtgaattttcccagacagtccccgaactggttgcctgggccagaaaaaatgatttttcaatctcgctaccggtcgacagactctctttcctgctggcgatcgccactctgaatggtgaacgactggaaggggaaatgagcgagggtgaactggtggatgcgttccgccacgtcagtgatgcgtttgagcagaccagcgaaaccatcagccagcgcgccaataacgcgatcaacgatttggtgcgccagcgtctgctgaaccgctttaccagcgaaattaccgaaggcaatgcgatctatcgcctgacgccgttggggattgggatcaccgattattatatccgtcagcgcgaattctcgacgctgcgtctctcgatgcagctgtcgatcgtcgccggcgagctgaagcgcgcggcggacgccgcggaagagggcggtgatgaattccactggcatcgcaacgtttttgctccgctgaagtattccgtagcggaaattttcgacagcatcgacctgacgcagcgcattatggatgagcagcagcagctggtgaaagacgatatcgcgcagttgttgaataaagactggcgcgcggcgatttccagctgtgaactgctgctgtcggaaacctccggcaccctgcgcgaactgcaggatacgctggatgcggcaggggataagctgcaggcgaacctgctgcgcattcaggactcgaccatggcgcgcgacgatctccattttgtcgatcggctggtgttcgatctgcaaagcaagctcgaccgcatcgtcagctggggtcagcaggcgattgacctgtggatcggctacgaccgccatgtgcacaagtttatccgtaccgctatcgatatggataagaaccgcgtcttcgcccagcgtctgcgccagtcggtacagacctattttgatgaaccgtgggcgctaacttacgccaacgccgaccgcctgctggatatgcgcgatgaagagatggccctgcgcgatgaagaggtcaccggcgagctgccggcggacctcgaatttgaagagtttaacgaaattcgcgagcagctggcggcgctgatcgaagcgcagctggcggtctataaagagaaaggaataccgctggatctcggcctggtggcgcgggagttcctggcgcagtatccgcgcgggcgtcacttcgacgtggcgcggatcgtcgtggatcaggcggtacagctgggcgtcgcccaggcagatttcaccggactgccggcaaaatggcagccgattaatgattacggagccaaggtacaggcgcatgtcattgacaaatattgaacaagtgatgccggttaagctggcgcaggcgttggccaatccgttatttccggcgctggacagcgccctgcgcgcgggccgtcatatcggtctcgacgagctggataatcacgcatttttgatggattttcaggattacctggaagagttttacgctcgctataacgtcgagctgatccgcgcgccggagggattcttctacctgcgcccgcggtccaccacgctgatttcgcgctcggtactgtccgagctggatatgatggtgggcaaaattctttgctatctctatctcagcccggagcgcctggcgaacgaagggatttttacccagcaggagctctatgacgagctgctgaccctggccgatgaatccaggctgctgaagctggtgaacaaccgttccaccggttcggatctggaccgccagaagctgcaggaaaaaatgcgggcctcgcttaaccgcttacgtcgtctggggatggtgtggtttatgggccacgatagcagcaagtttcgcattaccgaatcggtattccgctttggcgccgatgtgcgcgccggcgacgacccgcgcgaagcgcagcgccgtctgatccgcgacggggaagcgatggccctggaaaatcacctgcagctcaatgatgagaatgaagaaaaccagccggatagcggggaggaagagtaatgattgaacgcggtaagtttcgctcgctaacgctggttaactggaacggcttctttgcccggacctttgatcttgatgaactggtgaccactctctccggggggaacggcgcgggtaagtccacgaccatggcggccttcgtcacggcgctgatcccggatttaaccctgctgcacttccgtaacaccaccgaagcgggggccaccagcggctcacgcgataaaggcctgcacggtaagctgcgcgccggggtgtgttactcggtactcgatgtgatcaactcccgccaccagcgcgtggtggtcggcgtgcgcctgcagcaggtcgccgggcgcgatcgtaaagtcgatattaaacctttcgccattcagggactgccgacctctatcctgccgacccagctgttgaccgaaacgctgaacgatcgccaggcgcgcgtcgtgagcctcaacgagctgaaagataaactcgaggcgatggaaggggtccagtttaaacagttcaactcgatcaccgaatatcactcgctaatgttcgatctgggcgtggtggcgcgtcgcctgcgttccgcctccgatcgtagcaagtactaccgcctgattgaggcctcgctgtacggcgggatctccagcaccattacccgctcgctgcgcgactacctgctgccggaaaacagcggcgtgcgtaaagcgttccaggatatggaagcggcgctgcgggaaaaccgcatgacgctggaagccattcgcgttacccagtccgaccgcgatctgtttaaacacctgatcagcgaagccaccaactacgtggcggcggactatatgcgtcacgccaacgagaggcgcattcacctggataaggcgctggagtatcgccgcgatctcttcacctcgcgttcgcagctggcggctgagcagtataagcacgtcgacatggcgcgcgaactgcaggagcataacggcgcggagggcgatctggaagccgattaccaggccgccagcgatcacctgaacctggtgcagactgcgctgcgtcagcaggaaaaaatcgagcgctacgaagcggatctcgacgagctgcagatccgtctggaagagcagaatgaagtggtggcggaagccgtcgatcgtcaggaagagaacgaagcccgcgctgaggccgccgagctggaagtggatgagctgaaaagccagctcgccgactatcagcaggcgctcgatgtgcagcagacccgcgccattcagtataaccaggcgctgcaggcgctggagcgcgcgaaggcgctgtgccatctgccggatctgaccccggagagcgccgacgagtggctggaaaccttccaggcgaaagagcaggaagcgacggagaaaatgctgtcgctggaacagaaaatgagcgtggcgcaaaccgcgcacagccagtttgaacaggcttaccagttggtggcggcgattaacggcccgctggcgcgcaatgaagcctgggacgtggcgcgcgaattgctgcgcgacggcgtgaaccagcgccaccaggccgagcaggcgcaggggctgcgcagccgcctcaacgagcttgaacagcgcctgcgcgagcagcaggacgctgagcgtcagctggccgagttctgcaaacgccagggtaaacgttacgatatcgacgatctggaaacgctgcatcaggagctggaagcgcgcatcgcgtcgctggccgacagcgtctccaatgctcaggagcagcgcatggcgctgcgtcaggagctggagcaactgcagtcgcgtacccagacgctgatgcgccgggcgccggtctggctggcggcgcagaacagccttaaccagctgtgcgagcaaagcggcgagcagtttgcgtccggccaggaggtcaccgaatacctgcagcagctgctggagcgtgaacgagaggctatcgttgaacgtgacgaggtcggcgcccgcaagcgcgccatcgacgaagaaatcgagcgtctcagccagccgggcggttcggaagatccgcgcctcaacgccctggcggaacggttcggcggcgttctgctgtccgagatctacgatgatgttagcctggacgatgcgccgtacttctccgcgctgtacggtccgtcgcgccatgcgatcgtggtgccggatctgtcgcgggtagccgagcagcttgaggggctggaagattgcccggaagatctctatctgatcgaaggcgatccgcaatcctttgacgacagcgtattcagcgtcgacgagctggaaaaagcggtggtggtgaagattgccgatcgccagtggcgttattcgcgcttcccgtcgctgccgctgtttggccgcgcggcacgtgaaaaccgcattgaaaccctgcatgccgagcgtgaatcgctgtcagagcgttttgcgaccctgtcgttcgatgtgcagaaaacccagcgcctgcaccaggccttcagccgctttatcggcagccatctggcggtggctttcgaggacgatccggaagaagagatccgcaaactcaacagccgccgcggcgagctggagcgtgcgctgagcgcccatgaaagcgataaccaacagaaccgtgtgcagtacgagcaggcgaaagagggcgtgtcggcgctcaaccgcctgctgccgcgcctgaacctgctggcggatgatacgctggccgaccgcgtggacgagatccaggaacgtctggacgaagcgcaggaagccgcgcgctttattcagcagtacggtaaccagctggcgaagctggagcctattgtttcggtgctgcagagcgatccggagcagtttgagcagctgaaagaagattacgcctatgcgcagcaaacccagcgcgatgcacgtcagcaggcttttgccctggcggaagttgtgcagcgcagggcccacttcagctactccgattcggcggaaatgctcagcggcaacagcgatctcaacgagaagctgcgccagcgtctggagcaggcggagtccgaacgcagccgcgcgcgcgacgcgatgcgtgcccatgcggcgcagcttagtcagtacaatcaggtgctggcctcgctgaagagctcgtatgacaccaagaaagagctgctcaacgatctgtataaagaattgcaggacattggcgtgcgcgccgacgccggcgcggaagagcgtgctcgcgcgcgtcgcgatgagctgcacatgcagctgagcaataaccgctcccgacgcaatcagctggagaaagcgttgaccttctgcgaagcggaaatggacaacctgacccgtaaactgcgcaagctggagcgcgattactgcgaaatgcgcgagcaggtggtgaccgccaaggcgggctggtgcgcggtgatgcgtctggtgaaagacaacggcgtcgaacgtcgtctgcatcgacgcgagctggcctatctctccgccgatgagctgcgctcaatgtcggataaggcgctgggggcgctgcgtctggcggtcgccgataacgaacatctgcgtgacgtgctgcgtatctcggaagatccgaagcgtccggagcgcaaaattcagttcttcgttgccgtctaccagcatctgcgcgagcgtattcgtcaggatattattcgcaccgatgatccggtggaagcgatcgagcagatggagattgagctcagccgcctgaccgaagagctgaccaaccgtgaacagaagctggcgatcagttcccgcagcgtggccaacattattcgcaaaaccattcagcgcgagcagaaccgtatccggatgctcaaccagggtctgcagagcgtctccttcggccaggtcaacagcgtgcgtctgaacgtcaatgtgcgtgagacccactcgatgctgctcgacgtgctctccgagcagcatgagcagcaccaggatctgtttaacagcaatcgtctgaccttctctgaggcgctggccaagctctatcagcgtctcaacccacagatcgacatggggcagcgcacgccgcaaaccatcggtgaagagctgctcgactaccgcaactatctggagatggaagtggaagttaaccgcggctccgacggctggctgcgcgcggagtccggcgcgctgtctaccggggaagctatcggtaccgggatgtcaattctggtgatggtggtgcagagttgggaagatgaatcccgtcgcctgcgcggcaaggatatctcgccttgccgtctgctgttcctcgatgaagcggcgcgtcttgacgcccgctctatcgccaccctgttcgagctgtgcgaacgtctggagatgcagctgattatcgcagcgccggagaacatcagtccggaaaaaggcactacctataaactggtgcgtaaggtgttcaataatcacgaacatgtgcacgtcgtggggctgcgcgggtttgccgcgccgctgccggaagcgctgccgggaacggccgacgcctcctgacgatgcagctcactactggcgggtaagcgctgaaaagggcaacgttaagttgccctttttgctatccagcttgctatgccaggatggtataatctttaagcttctttacattaggtaaggcaaaagccttttcgtctttatatactgtgttaaagcccacgaatttgtgggcggcaatgtgtgacaacagggggcaagggatgttgcttaagaaacggtatggtcgtccattgtcagcgctcagtctgagcctggcaatggcatttgctccgctgttcaatgtccaggccgcagagcctgaagtcgtaccaggtgatagctccgctacgcctggagagctttccgtcgcgctgtcgcaaagcgacgggcaatcgccggcggtcgcgaagctggccggtgagcagccgctgtcgatggaagccgcggcgaacagtcgcgcccagatcgaagcgctattgccggctggctacaaacccgtctttatgaatccgctggtctcgctatacgccgccagcgatatgaaaccgatgtgggaaaaccgcgaggcggtgcaggcgttccagcagcagctggcggagatcgccatcgccggttttcagccgcagtttaccacctgggtcagtctgctgaccgatcctgccgtcagcggtatggcgcgcgatgtggtgttgtctgatgccatgatgggctatctgcactttatcagcggcatccccacccaggggacccgctggttatatagctcgacaccgtacaagatggcgaccccgccgctgtcggtgattaaccagtggcagctggcgctggataatggctccctgccggcgtttatcgccggcctggcgccgcgtcatccgcagtatgaggccatgcaccagtcgctgctggcgctggtggctgattcacgtccatggccgcagatgaccggtagcggctcgctgcgtccgggagaatggagcaatgatatcggcgcgctgcgcgagatcctccagcgtaccgggatgctgaaaaattccgccaatatcgttctgcccggcgacgtggtgagtccttcggcgaagaaaaagagcaagcccgcggcgcgcggtgtgtacgatcgccagctggtggagggcgttaagcgctttcaggccatgcaggggctgggggcggatggggtcatcggccaatccacccgtgactggctcaatgtctcatcggcgcagcgcgctggcgtgctggcgctgaacattcagcgtctacgtctgctgccaggcaaactatcgactggtatcatggtgaatattcccgcgttttcgctggtctattaccaggacggcagtcaggtgctggcctcgcgggtgatcgtcggacgtccagaccgcaagacgccgatgatgagcagcgcgctgaacaacgtagtggtcaatccgccgtggaacgtaccgcccaccctggcgcgcaaagatattctgccgaaggtgcgtaataatcctggctatctggagcagcatggctacaccgtgatgcgcggctggaacagtaaagagaccatcgatccttaccgggttgactggtcaaccatcaccgagaacaatttaccgttccgttttcagcaggcgcctggggcacgtaattcactggggcgttacaagtttaatatgccgagttcggatgctatctatctgcacgatacgccgaaccataatctgtttcagaaggatgtccgtgcgctcagttccggctgcgtcagggtcaataaagcctcggagctggccaatatgctgctgcaggacgcgggctggaatgacacgcgcatttccgacgccctgaagcagggggatacgcgctatgtcaatattcggcaaaatataccggtgaatttatattacttaacggcgtttgtggacgctgatggacgtacacaatatcgaacagatatttacaattacgatatcaccgcgcgatccagcgcacaaattctgacgaaagcggaacaattaatcaggtaaatgaagtagttcaatggattttgttgtcctagcactgggtaaaaaagggcgctgcacctctgcagcgcccgattttcctggggtgaggctgccttgacgttggcaataatgcccggtaaggtgcctttcgtgcgccagaagtgcatatacatatcattccgctcaatgcgtagcgcggttagcgcgaacgctctcctttgccgggcaacatctcggtcgtggcgagcgatagcgagctgatcctggcatcgcgcaaagcggaaaaagtatataacgattcattgactgtagacctgattatcatggacaaatttgacgctaatcgccgcagattgctggcgttgggtggcgctgcgctgggtgctgccgccattctccctgcgccggcatttgccaccctctcgaccccccgtccgcgtattttgacgctgaataacctgcataccggtgaatccctcagggcggagtttttcgatggcagaggctatattcaggatgaattagcaagacttaaccattttttccgtgactatcgcgcgaataaaattaagtccatcgatccaaatctgttcgatcatctttatcggttgcagggactacttggcaccaacaaacctgtccagcttatctctggctatcgttccctcgataccaacgatgagcttcgcgcacgaagccggggtgtagcgaaacacagctatcacaccaaggggcaggcgatggatttccatattgaaggtatttcgttaagcaatattcgcaaagcggcgttatctatgcgcgcaggtggtgtaggatattacccacgtagtaactttgtgcatattgataccggtcccgtaaggcactggtaacgaaaggagcgtcatgaactatcgtattattccggttaccgcgttcgcgcagaactgttctcttatctggtgcgggcaaacccggctggcggcgctggtcgatcctggcggcgatgctgaacgtatcaaagcggtggtggcggaggctggcgtcacgctgatgcagatcctgctgacgcatggccacctcgatcacgttggcgccgcggctgaactggcgcagcattatggcgtaccggttattggtccggaaaaagaggatgagttctggctggaaggattaccggcgcaaagccggatgttcggcctggaggattgccaaccgctgcgtccggatcgctggctcaatgaaggcgatgtggtcaatgtggggaatgtggcgctgcaggtgctgcactgcccgggccatacgccgggccatgtggtcttttttgatgacgcctcccgactgctgatctccggagacgtgattttcaaaggcggggtgggacgcagcgattttccgcgcggcgaccatgggcagctgattgcggctatcaaggaaaagctgttgccgctgggcgatgatgtgacctttattcccggccatggtccgctgtcgacgctgggtgaggaacgccgtaataacccgtttctgcaggatgagatgccggtctggtaacagacatgacgcgaacacataaaaaaggccgcattcgcggcctttttctttataccgaatactatcgcttacagtacggcgacgatggcttcgcacagcggcgccatattgtcaggcgtcatcccggccacgttgatacgtccggaagcgaccgcatagatggcgaactcttcgcgcaggcgcagcacctgctctttagtcaggccgctgaatgagaacatgccgttctgctggctgataaagctgaagtcgcggctcgcgcctttctcctgcagggtattgacgaacagcagacgcatacgctggatgcgctgacgcatatcggtcagttcctgctcccagattgcccgcagcgcatcgttgctcagaatggtggcgaccacggaggcgccatgcgcaggcgggttcgagtagttggcgcggatcaccgacttcatctgactgaaggcgcggtctacagtctcttgatccgcggcgaccagagtgcaggcgccgacgcgctcgttgtacaggccaaagtttttcgagtaggagctggcgaccagcagctctttatgtagagcagcaaaagcgcgtagcccttcagcatcttcttccagaccgcgggcgaagccctggtaggcgaaatcgaacagcggtagccagcctttttccaccgacagctgcgccagctgctgccactgatcgagcgtcggatcgataccggtcgggttgtggcagcagccgtggaacagtaccacgtcgcccgcctgggcttcgttcaggctggccagcagaccatcaaagtccagcgcgtggttagccgcgtcatagtaagcgtattcgcgcacttccagcccggcagaggtgaatacgcttttatggttcggccagctcggattacttacccacacacgtttcacgtcggtgtttttggcgaggaagtctgcggcgacacgcagcgcaccggtaccgcccggtgtctgcgcggtgcgggcgcgtttatcagcgataatcgcattgcctttaccgaacagcagctcctgggtgcagcgaccaaattcaggaataccatcgatgcccagatagtttttagtcgtttcattttccagcagatactgctctgcttttttgacgctggtcagaacgggcgttttaccggtttcatccttgtaaacaccaattccgaggttaattttttcagggcggtcatcggcacgaaacagatcggccagacctaaaatcgggtcggctggggcggcggtaatgttctcaaacatgacgaggttccattgtgattactgaagggaaatccgctatcaggttaacgggagaataacgaattgccaaccgtttgcgacaaaaagcgcgaaggttttcgaaagagacgatctttgtctcacgaatacagaaaagcaggaccgaagtcctgctttgaaggcatatcacgaaggggtgtactgcagattagaactggtaaacgatacccacggccgcctggtcgtcagtggcgacaccagccgctttggtgtaatcgttgtcgtccagctggttgaatttatacgcagcgtagacgttcatgttcttgttaaagtagtaccaggtacccacttcgatgtatttaaccagatccgcatcgccgccggagaagccagcacgcgactgcaggtccttgccctttggtctgtacgtagccgatggacggacgcaggccgaagtcaaactgatactgtacaactgcttcaaagttctgagttttaccggcgaagtggttatcttcttccggagtcatgttgtaagtctgggagtacatgacggccgcatagatgttgttagcgtcatattttgcagaggtcgcccaggcttcggctttgtcgccattgccgtcagctttctgatcgacgctacggttagagctggagtagcctgcagacagtgcgataccgttgtcgaacgcgtaggtggctgcggtgctgaagccgtcgccattctgcttgcgaatcgcacggtcatggtcgtttttaccctggtactgcagcgcgaagctcagaccgtcaaccagaccgaagaagtcggagttacggtaggttgcgacgccgttggtacgaccggtcatgtagttgtcggtatagttccagccgtcaccgccccattcaaccagcatatcggttgccgcttcgacgtcgtagatcgcgccgtagttacggccatagtcgaatgaaccgtattcgcccgctttcaggcccgcgaacgccagacgggtttttgtggtctgggaaccttcaacattggacgcgtccatgttgtattcccactggccgtagccgatcagctgatcgttgatctgagtttcgcctttcaggccgatacgggcataggtggtatcgtcgctgctggtgtcgccattggtggtccagacgtgctcgccgaccatttttccatagaagtccagtttgttgccgtttttgttatagatttctgcagcgttggctgcaccggctaccagcagggcagggatcaccactgccagaatattgcgcttcatcattatttattaccctcattaatattttggctatttgcattctgaggtaggatcgcaaatttagccaagaattgaaatccatccccttttgtgcaaaatctggttgacattcgcagattgactacagtaccattctgtgcaaaaggtggttggaggccagaatgaacgaatttacgggatcggcagcttcacaggctgactttatttggaagaatgcggaagacctgtggggtgacttcaagcatacggactttggcaagatcatcttgccgtttaccctgctacgccgtctggagtgtgcgctggagccgacccgcgaggcggtgagagaagcgcatgacgctttcaaggatgccgatgttgagctggataccattctgcgctcaaccgctgaataccccttctacaacacctctgaatactccctcggcaccctgggtagcaccaagacgcgccgcaatctggaagactacatcgccctgttttcggataacgcccgcgctatcttcgaggagtttgagtttggcaatacggtgatccggctggagaaagcgggcttgctgtataagatttgccagaacttcgccaagatcgacctgcacccggacgtggtgccggatcgggtgatgagtaacatctacgaacacctgatccgccgctttggtgctgaggtcaatgaaggagccgaggacttcatgacgccgcgtgacatcgttcacctggcgaccgcattgctgcttgacccggatgatgccctgtttgaggccagcccaggtttgattcgtaccctgtatgacccgacctgtggcacgggtggcttcctcaccgatgctatgaaccatgtgggggactacggtaaccgcgacaagatcccgccagtgctggtgccgcacgggcaggagttggagccggaaacccatgcggtttgtgtggccggtatgctgatccgccgtttggagtcggaccctggccgagatctgtcgaagaacattcgtcagggcagcacgctgtccaacgaccagtttgccggtgagcgtttccactactgcctgtccaatccgcctttcggcaagaaatgggagaaggacaaaaccgctgtcgaagcggaacacaaaaaaggcgagctgggccggtttggtccgggcctgccgaaaattagcgatggctccatgctgtttttgatgcacctggcgagcaagctagaactgccgatcaacggcggtggccgcgccgctattgtgctgtccggttcgccactgtttaacggcggtgccgcgtctggcgaatcggaaatccgccgttggttgctggaagacgacctgattgaagccattgtagctctgccaacggatctgttcttccgcaccaatatcgccacctacctgtggattctgtccaacaagaagcctcaggagcgcaaaggcaaggtgcagttgatcaacgccaccgacctgtggacttcaatccgcaacgagggcaacaagcgccgtattgtcagcgatgagcagcgccgccagattctggacatctacgcagcaggcgaaaccggtgcgctttcccggatgctggactaccgtacctttggctaccgccgtatcagggtcctgcgcccgctgcgcatgaccctagagctggataaggtgggtatggagcggttggaagccgaagctgcctgggaaaagctctctgacgcgcatcagacattctggcgcgaagccctcaagccgctgatcgggcaaacgcagccctatagctgggcagaaacctttgttagcaactcgatcaagtccgatgaagccaagcagctcaaggtcaaatccaacaagacattgatcaccgcgctaatcaacgcctttggtcacaaagacccgaaagccgagccagtcacggattcaaacggcgagctggtgccagacacagatttaactgattacgagaacgtcccctatctggaggacatcgacgactactttgcccgcgaagtgcttcctcatgtgccggatgcctggctggatgagagctttaccgatgccagggatggtcaattgggccgcgttggctacgagatcaacttcaaccgcttcttctaccagtaccagccgccgcgcaagctgcatgatattgatgaagacctgaagcaggtagaagccgagattgccgcgctactggcggaggtggccagcgaatgagtcagtacaaagcgtatacctcatacaaagattcaggcgttgagtggattgggcaggtgccggagcattgggaggtgaaaaggttacgtcatgtcgggcgttactctaatagtggcgttgacaagaagagctacgaagaccagcagacggttgagctttgtaactacacggatgtctattacaacgagttcatcagtgatgatatgcctttcatgcaggctactgccagcgcccacgagattgagcagttcactctgaaaaaaggcgatgtcattatcacgaaggattcagaagacccatccgacatagggattcctgcctttgttccacatgatatgcccggagtggtttgtggctatcatctcactatgattcgtgccttaaatgataactatggaagctatatccatcgctcgatccagtcggatcatacaagagctcacttctttgttgagtcgccaggaataacccgatatggcctgaatcaaaatactattggtaatgccccagtagcgctccctccaccagaagaacaagccaccatcgcggccaccctcgaccgcgaaaccgcccgtattgatgcgcttgtcgagaagaaaatccgctttatcgagctactgaaggaaaagcgccaggcgctgattacccatgcggtcaccaagggcctagaccccaacgtgaagatgaaggattccggcgttgagtggattgggcaggtgccggagcactgggaggttaaacccttcttcgcgttggtgtcagaactgaaccgaaagaatgtgggcctagctgaaaccaatatactgtccctcagctacggaaacatcatccagaagcctgaaaccagaaatatgggattaacaccagagtcttatgaaacctatcaaattgtagagtctggcgaagttgtatttaggttcaccgatctgcaaaacgacaaacgtagcttgcgttcagcccaggttacgcaaagaggaatcattacctctgcgtatatggccgtgaaaccgcacagtattggttctacatattttgcatggttgatgcgttcatatgacctttgtaaagtcttttatgcaatgggtggaggattgaggcagtcattgaagtttgaagacgtcagaaggcttcctgtacttatccctccagtcggtgaacagagtgaaattaccaatacaattaatgcaggaactgctcgcattgatgctctagtcgagaaaacagaacaaagtatcaccctgctcaaagaacgtcgcgctgcctttatcaccgccgctgtcaccggccagattgatttgcgaggaaaacaataaatgcaatcagcagcacatcaggaaaaacacttccagcaatacatcatcgaccggttggtagagcagggctggaagctgggtgattccaagttctacgacaccgagcgggcggtgtaccccgaagacctggaaagctggatcaaaaccagcggccagcaggaaaaatgggacaagctggaacggctcaacggggccaaaacccttgaagtgctgatggatcgcttggataaagcactggagaaacaaggcaccatgcaggtgttgcgccagggtttttccattgccggttgcggcctgatcgagatgaccgaggctgcaccggaagacaagcgcaatgcagcagtcattgagcgctaccaggccaatatcctgcgcgtggtgccggagctgaagtatcacccggcccgtgaatttgccattgatctggtgctgtttatcaacggtctgccggtggcaaccgtcgaactgaagaccgacttcacccagtcctgcgaagcggccatggatcagtaccgcaatgatcgcctgccgtatgacgccaagaccaaacgccgggagccattgctgaccttcaagcgtggggcggtggtgcatttcgccatgtccgactctgaaatcatgatggcgaccaagctggatggagaaaacacctttttcctgccgttcaataaggggcgcaaggacgaaagtggcacggtacatgcgggtaacccgccaggtgagattaaggccgatggtacccaggaatacccggtagcctacttctgggaggcggtctgccagccggatgcctggctgcggattttccatagctttgtctacgtcgagaaaaaggacgttgtggatattcagggcaactggtcgaagaaagaaaccctgattttcccgcgcttccaccaatggacggcagtgaaccagatgctgaccgatgcccgcgaaaacggcgcaggcatgacctacctgtgtgaccacagcgccggttccggcaagaccagcaccatttcctggacggcccatgacttggtgaaactgcgcgaagataacggcgattcggtatttaacagcgtgatcattgtcaccgaccgcaatgtgctggacggccagcttcaggacgcggtgaagcagattgaccatcagtttggggtgatcgccgccattgaccggcagaagtcatccaagtccaagagcaagcaactctcggaggccttgttgtctggcacgccgattgtggtggtcacgatccagaccttcccctacgcgatggaagccatcatcactgacaaggccctgaaagggaaaaactttgctgtgatcattgatgaggcgcataactcgcagacaggctctaccgccgctaagctgcaagccgcgctggggatgagtgggcaaggcaagatgtccaccatgacggtggatgaattgctggaacaactgcaaaaatctcgggctcgcccggacaatatcagctatttcgcctttaccggtacgccgaagcactccactttgatgctgttcggtcgcccaacagacccgagccagccagcctctaacgataaccctccacaagccttccacctgtacaccatgcgccaggccattgaggagaaattcattctcgatgtgctgaaaggctatgtgccctacaaaacggccttcaacctttccaagcagcttgaagacagcaagcgggtaagcggcaaggccgccaaacgcgccctggcacagtggatgtcattgcatcccaccaatgtgacccagaaggtacagtttatcgttgagcacttcaccaaaaacgtcgcccaccggctggatggcaaggccaaggcgatggtcgtgaccagctcccgcgccgctgccattcgctacaagaaggcgtttgaccgctatatcgagcagcacagcgagtacggctttattcattcactggtggccttctccggcaagatgaccggtaagcaggtgatgcaccaggatgacagcgagttcaaggatgatgtgtttatcgtcgatgagaacgaagagttcaccgagcagagcatgaacccggatgtccaagggcaggatttgcgctttgcctttgaccgacctgaataccgggtgatgttggtggctgacaagttccagactggctttgatcaacccaaactggtcgccatgtatgtagacaagaaaatcgctaaccatgtggagattgtgcagaccttctcccgtctcaaccggacggcgcccggtaaggatgaggtctttatcatcgactttgtgaacgacccggagaacgtgcgtcaggcctttaccacctatgacaagggtgctcacatcgacgaagtgcaagacctcaatgtggtctacgagatcaaggagcgcttggacgagcacggcctgtacgacgagaaggacttggctgcgttcaaggaagcacgcttcaagaccatccgcgacatcacccataccaaatcgccacagcacaaggcgctgtatgccgccactgctggagcgacggccttgtataacgacaagatgaagatgctgcgcgatggcatggcgacctgggaggcggcttttgagaaggcccgcgccaagggtgatgaggcgggcatgaagtctgctgaccaccatcaggatgagtacgccgagcaaatcaaggcactgattggcttcaagtcggatttggggcgtttttgtcgtacctactcctatatcgcccaactgattgattttggcgacccggagctggagaacttcgccgccttcgccaagctattgcaaaagcgccttcagcacgaagcacctgaaaccgtggacttgaccggcctggtgctcaccggttttgacatcaatgctcgttcagataacgcggaggacgaaggcgaaaccccggtactgcaaccggtaggtgcaggcggtggtggtgtggcgggcgacaagccgaaattcgtcaaagagattattgagcgactcaacagcctgtttggtgaggcaacgccgatccaggatcaggtggccttcgtgaatcagatcttttcaatcgccggcgaaagcgatgtggtgatggctcaggtggaaagtaacacccgcgaacaggccatgaaaggcaatttgcccggcgctgttcagcaagcggtggttcgtgctttgtccagtcatcagaagctggcaacccaagtgctcaagtctgaccgtcagggcatgaccgcattggttgatatggtgtatgacctgctgcgcgaaggcaaagacatcgatctgggtatggattaagccgatgcttgacctgctgaatctgccaggcatcaagccggtcgatatgcgccacgaaggcaagtgccttgtgatagttgctgagccggtaacggtcgaggtgccgttatgtggggagtgcaacatccctatgcacagacacggtacgcgcaaaaacaagttcatggacacgccgttgtacatggagcccgtccgccttgaagttcagcgcccgcgctttcgctgtgagtcgtgcggaaaaatgtccatgccggagttgagttttctggatgacaaacgccgagccaccaaacggctggtcgatgttattcggcaacagtgcctgggaaccaccttccatgctttagccgagcaaaccggtgtggcggtgaacaccgtcaagaacatcgctcgcgatctcattgaggaactctcccaaaccgttcgttacgaaaccccggtcatcatgggtattgacgaagtgaacctagccggagggtatcgctgtgtaatcaccaatctggcaaccaacaacgtctttgatatgttggagcatcgtactcaagagcatttgaagcccttcttcaaggatttgccggatgctgacaaggtggaatgggtctgtacggatatgtggcgacccttcaaacgttcctttgctcagtatctgcccaacgccaaactggtgatcgacaagttccatgtcgtcaagatggcctctgaagccttggaagcggagcgcaagaactatcaggcacagttaagcaaagaagatcgcatttacgtcaaaaagtccattcgctggctcaccctgaagcgacccggcaacctaacgcccgcagagcaaaaggcgctggaggttgtaaagcaggcaatcccagcacttgccatggcctatgacttcaaggaagccttcttctgcatctacgacgaacccgacaagcagagcgctcagaacgcctttgaggcttgggagaacagcctgccgccttatggcatggagcctttcaaaaaactggtaaaaacggtacacaaccattacgacgacatctttgcctactgggatgcgccgttctcaatcaccaatggctataccgaagggctcaacggcttgatcaagatgtccaaccggttaggtcggggttatagctatgagatcatccgtgcaaagacgttgtactccaaagaagcccgcaaggttggcagtggtattcgagcaggacgaggcaaggtcgagtatggaccgcacattccgacattgttgaagcaggcagaaggtggagagttggattaacgcgagagagggcgcgtctgagaatccaaccaatgttagattttcgcagggtggtgaaaagcagaaaaatccaaccagaagcagctttttgtccgactaagaattaagggttagaatggatgaattccaaccctagaatgcaaatagccaatattttttatatgaacacgtgccactgccgtcaataagttctgtcaataaaaacttacagaaccattgatgagagtttggtgtctgaaggcatctttccatccgcgacaacgtttcgctagccggaaaatgctacgaatatctcatatgagtaacaaaacgaaaaatcatgtaactaaatgtgtatttaacggaactttgtgaacttaatcaaaattccgttccaccggataagggaaaacgcgattgcttatctatctatatgaattatttatgattaatttggctaagcggcaattcgttcattttgtgtattgaattcgtattctttttattcagtctctgtctttgcaagatgtgcgggtaaaggtcaaaaaatgagcaaatttatcagcggttttgctcagttatgaacataaagtgcgatctacatcaccaggatgcaccgaaacagtgcgtaacataattgtgatttccaggtcttgatgtttaaggttgttgaattttactaacagtaattgacataaaaaaaggccaacttgcgctggcctttcagattgatgtcagaaaaatttagaatgtcgcgttgcgcggcgtccgcgggaacggaataacatcgcggacgttctgcacgccggtgacgtaagcgatgaggcgttcgaagcccagaccgaagccggaatgcggcacggtgccgtagcgacgcaggtcgcgataccaccagtagtcttctttgttaagccccatctctgccatacgcgcgtcaagcacgtcgagacgctcttcacgctgggaaccgccgataatctcgccgatgcccggcgccagaacgtccattgccgcgacggttttaccgtcttcgttaaggcgcatatagaacgctttaatgtctttcgggtagtttttcaccaccaccggcgctttgaagtgctcttcggccaggtaacgttcgtgctcagaggagagatccacgccccagtacaccgggttctcgaactgtttgccgcagttttccagaatggtgacggcgtcggtgtaatccacctgggcaaaatcagcggtgataaagcgctgcagacggtcgatagcgtctttatccacgcgctcggcgaagaactgcatgtcgtccgcacgctcttccagtaccgctttgaagacgtacttgagcatcgcttccgccaggccggcaacgtcgttcaggttggcgaaggccacttccggctccagcatccagaattccgccaggtggcggctggtgttggagttctcggcgcggaaggtcgggccgaaggtataaatcttcgacagcgcacaggcgtaggtctcgccgttcagctggccggaaacggtcaggaacgactctttaccgaagaagtctttgtcgaaatcgactttgccctgatcgttacgcggcaggttttccagatccagcgtcgacacgcggaacatttcgccggcgccttcggtatcggaggcggtgatcagcggggtggaaacccagaagaagccctgttcgttgaagaagcggtgcagcgcctgcgccagggtgtgacgcacgcgggctaccgcgccaatcaggttggtgcgcggacgcaggtgcgctacttcacgcagatactcgatgctgtggcgcttggccgccatcgggtaggtgtccgggtcttccacccagccggtcacttccacgctggtcgcctggatctcaaagctttgaccctgaccctgagaagccacgactttaccggtgacaatcaccgagcagccggtggtcagacgcagcacttcctgattgtaattgggcagagaattattaataacggcctgtacaggatcaaagcaggaaccgtcatagacggcgaggaaagaaaagccagctttagaatctcggcgggtacgcacccatccgcggaccgtgacttcgctgtcaacggcaacgcggccctggagtacgtcggctacaggcacaacgctcataataatctctctatgtagtccaataaaaaagtctcttcccccaacagcggggggatatctatgttacctgtcatcttccatcagacaagtagatttcgcacagggaagggtggatttcggaaataaatacacctccggggcgttctttggctccccatttcgacttttacacgacttactcgataatgaccgtcatttcctgcttcgcattttgcatcgacacgatggtccggaaagacttgatatttcccgaggcaaaaaagagttcacgggttagcgcttcgtattccgccatatcacggacgttgatcacgagcaggaaatcgaagtcgccagtgacatagtagacctgctgcacttgcggacaggttacgaaacgctgtttatcctcctcaagcagatcgagacgttcattctcaatggtcacctgcaccataatggtgattggtcttcccactttactggcgtccactaagctaacactgcctttaatcactcctgcatcctccagtgcagcgatacgccgattgactgccgaaggagacaggctgatccgatcggcgatctcccgttgcgacaagcgattattacgctgcaagagcgtaagaatttttttatcccatgcgtcaagtttcatcatatatctcgtcctgcaagcctgtgatcaacctcactaatgcaacgttgttgcgtgagaatgataaaacagagtgaaaattgcggcgcgatgggcaactttgcgccaattaaccgccgggcgcagtgtaccatcacaggcagtgggaaagcggtatatcgcgacaaaaagcctctcacattctgacttaaccaatttaaagcgaccgtcctgtctcaggccgcacggatccgtgcacccgttgtttaggcggaatggtcgcaaataacgttatcgtcgcaggacgatatgaaaatagaggtgcctgaatagtggacacaattaaatttcaacttaacgcccggcggcagccctatggccagggagcagacttgagtctgctgaatgaaagcgtggggaacgaagtgctggcattccatcaaaaatttcctgattaccgggtcacgccgctgcgtaagctggaatttttaagccagcggctggggctgggatcgatccatataaaagatgaagcgcagcgattcggtttgaatgcgtttaaaggattaggcggatcttatgcgatggggaaatatctcgccgctctgcttgagcgagatattaatacgttgagctttgccgagcttaattcaccagtgattaaggcgcgtatcaaggacatcgtatttgtgactgctaccgacggtaaccacggacgtggcgtggcgtgggcggctgagcagcttgggctgcgtgcggtggtgtatatgccaaagggctcgtcgccggtacgcgcgcagaatattcgccggcatggcgccgaatgcacgattactgaactgaactacgacgacacagttcggctggcggccaaaaccgcgcgcgagcagggatgggttctactccaggataccgcctggcagggctacgagcagatccccacatggatcatgcaaggctatatgaccctcgctgttgaaatctggcagcagctggcagaaagcggagcgccgatgccgacgcatctgtttttacaagccggggtcgggtcgtttgccggtagcatcatgggatatttcatcgaaaagatgcagcagcaggctcccaccatcatcatcgttgagccgcacaaggcgaactgcctgtatcgctcggcaaccattaatgacggactgccgcacagcgtcggcggggatatgtcaactctgatggccgggcttgcctgtggtgaacctaacatcaccagctggccaatgctccgcgaccatgccacctgttttatttccgccgacgattgtctggcggccaacggcatgcgcctgttggccgccccgcgaccaggtactgacgaaccttttgtctccggggaatccggcgctattggcacaggagtgctttatgcgctgatgactcaaccggcgtatcgcgagcttgccgaatcgctgcgcctgaatgccgatgcacaggttctgttaatcagcacggaaggagatacatcacccgatgtctatgaagacatcgtctggtttggccgtaatggttgagcgctatcgacaataacaagggggccatcttacctaccctacaagccctcggtatgacaagcgttctgactcataacgaaaacatacgcgctttcgcgtcatgcatagagagaacctgaccgatgaatactgaaaatataattatcaataaaggatattccgatcccgcaaagtggcatagcgaagataccgtttgggtccttggcctgttcggtaccgccattggcgctggggtgctgtttctgccgattaatgccggaattggcggcttctggccgctgctgattgtttttgtcctcgcttttcctattacttatctggctcaccgcggtctggcgagattcatttactcttccaatacgccggaaagcagtattaccgatgttattggcgagcattttggcgcgctggcgggaaaagtatttaccgtcatctatttcttcgccgtctataccattctgattatgtatgcggtggctatcaccaacaccgcgcagagctttatcacccaccagttggcaatggccgagcctccccggtcgctggtggccatcgttctgatcctcgggctgatgtttatcgtccgtttcggacagcgtttgataatgcgggtgatgagcaccctggtttatcccttcatcatctcgcttatttttatggcactttttctgattccgcactggaacggcgcaattttgcaaaccgtaagcttcagcgccgcgggcgatgggcaggggatcatgttatccctgtggatgaccttcccggtactggtgatgtcgtttaaccactatcccatcatttcgccgatggtggtgcgccagaagcagcgttacggtctggcgctcgctgagggtaaatgtgcgcagatccagcgctacggtatcctgctcatgacggtggtggtgctgttttttgttctcagctgcgtgttaagcctgtcgccgcagcaactggcggaagccaaagcccagaatctgtcgattttgtcctatcttgccaatcagtacgatacaccgattattgcctggctatcgccgattatcgcctttgtcgctattactaaatcatttcttggccactacatcggcgcctatgaatcgctgcgcgacctgattctggaggccgccgccgcacgcgggaaaaaacctggtattcgcctcgtcgacgcggtcatcctggtgtttatggtgcttacctgctggttcgccgcgtacaagaaccccagtatcctcggtattatcgaatgcatcagcggtcccaccggggcggcaattctgctgctgttgcctatgtacgccattcataaattaccggtgcttgccccctggcgcggtaaagcgagcaacgttttcgtcaccctgatcggtcttatcaccgtatctgccattttttacggcatgttccaataaccaccattattagcgagatgttatatgagtcattatctgcagattaacggccaacggcttatcgattccctgtatgcacttggcgaacatggtgcgctgccaggcggcggcgtatgccgcctggcagcgactgccgaagataaagccggcagggactttgttgtagcccgcatgaaggcgctgggcctgagcgtgtcaattgatgctatcggcaatgtcaccggcgtttatcacggcgaggagacgttgccgatggtgatgatggggtcacatatcgataccgtcgccaccggtgggttatacgatggcaactacggcgttatggccggccttgaggtgattgccaccctccaggatgccgggatccgcacccgacgaccgttggcggtaaccttctttactaacgaggagggggtgcgatttcagcccgatatgatgggcagcgtggtgtttgccggcgagtatccgttggcgcaggcgctcgcggcaaaagatctcgacggtatcacgctcgatgaagcgctgcgtaacattggttataaaggcgaacgtcagccgggagatatggcggtagatagctacgttgagctgcatatcgaacagggaccaattcttgataaagagcagattgatattggcgtggttaccggcgtacagggtatttcgtggcaggaatttaccctgagaggcgtatcgaatcatgcgggtactaccccaatgtccatgagacgtgatgccgggctggcggctgcgaaaatcgctgtttttgcccgtgagctggcgctaagccttggtggtaatcaggtagctaccgttggacatttcagcgtgaagcctaatctaatcaacgtcattcccaaccatgtcgtcatgtcagtggatctccgcaataccgataatgcgatcttatgtctggcggagcagcaattggccgaatttgtcgcgaaaacgtcgcaggaagagggcgtggagataaccagccgctcactggtgcgctttaatcccgtcatttttgccgatgagatcgtcaatgcggtggaagccgaggcggagcgtcaggcgctcagttaccgacgtttgccaagcggcgccggacacgatgcacaatttatggcgtcggtatgtcccgccgggatgatttttgtcccctgcgtcgatggcattagccataacgtcaaagaacatagcgcagccaaagatctgattgctggcgccaatgtgctgctgcaggtggttttacagcgcgcccagcgtatggactaatgtttacaggagcagagaatgaatcagcaacagctaaagcagcagcttatcgcctggcgtcactatttgcatgcccatccggaaagcgccttcgaggagcagaatacttcacggtttattgccgaaaagctcgaagctatgggcattgaggtgcaccgcgatattggcaaaaccggggtggtggggagattgaaatgcggcgacgggaagggcgttatcgctattcgtgccgatatcgatgccattcaattgaccgaacagggagactggtcttaccgctccatgaccgccgagcggatgcacggctgcggacatgatggtcatacctgcattgcgctgggcgcggcgcagttgctattgcagcggcagaattttaacggcacggtctgctttgtttttcagcctgctgaggaacctggctatggcgccagagcgatgatggacgatggcgttattgaacgctttggcatagaggaaatctacggtctgcataatatgccgggtatgaaagccgggactatcgccacgcgagtcggtggcattatggccagtgaagataactttattattcgtattaaagggcagggagcgcatgcggcgcggccgcatatggcgaaagatccgctggtcattgcggcggaaatcatcctggctttgcagacaattgtttcgcgaaatgttgatccgaacgtgccagcggtcatttcctgtactgaactgcacaccgatggcatccgcaatgcgattccgacgcacgtcgaaatcaaaggggatacgcgcagctttgcaccggaggtgcagatgctgctcgaagaacgaatgcgtaccattagcgaagcgatttgcgcgatgcacggtgcgacgtgccagttcagctatacccatgaatttgcgccaacggtgaactggcagcaatgcgttgatgtagcggtcaccgctgcgattaacgtggtaggggctgagaaggtggacggcaacgtcgcacagatgatgatttcggaggattttggcgcttttctgcaaaaaatccccggctgtttcatctttttaggcaacggcgatagttcagatgctcagggcaatacaccgttgcataatgcctgctacgactttaatgatgagatattgctaactggcgcggagtattttgccgaggtcgtcagagcccgtttgccgcaggagtgatattgattggcccgatagcagaatgccgtcgggccatgttttttagcttgcctttttaatcggcggcaggtcgaaagcctcgcgcagggcgcggacgaaggccttatcgtggcagatggttttccccgggctgtcggagagtttcgccaccggcttgccgttacattccaccagcttaatcacgatattgagcggtttaacctgcggcagatcgcaggttaaacgggtgccgatcccaaagctgagcttcacccgcgaggcgaagtggcgatacagatcgacggctttcgccaggtcgagattatcggagaagaccagcactttgctcagcggatcgatacccagcttctgataatgggcgatagctttttctccccattccaccgggtcgccggaatcgtggcgcaacccctgatagcgggtggcgaattccggaccgaaatcgcgcaggaacgcatccatagtgatgcagtcggtcagcgcgatgcccagctggtcgggatactcttccagccaggcggcaagagccgcccgctggctgctggcaaggctggggctgatctgctggtgggcctggaaccactcatgggcctgggtacccatcggggttaaattcagacggcgcgccagatcgtaattgctggtgccgacaaaccatggttcctgctgcagacgccgcacaataccttcctgcacctcgcgtgagaaacgacggcgggtgccgaagtccatcagacggaaggcgctcatgtcgaggtcagcggtcatggtggcgaagtcgcctagcttatgttccagcgtgttgagcgcctgatcgacgcccatctctggtgaacgatagcgatggaccaactcgcttatcaccgccagcagcgggacttcccacatgatggcttcccgccatgggccggtaaggcgaatgttcagcttaccattgtcattgctgaccgtgacctggctcgggtcatagcgaaaatcgcgcagccagttgaggtaatcctggcgaaaaaagggaagggtggacagccagcgatattcatcatcccgcagcctcaggtcgcgcatggactccacctgctcgcggatcgcgtcggcatagatgccgagcaggtcgtctccgcggcagcgaaactccgccgccacatgcacatcgccgtagcggtggaagacagcctgctgcatgtgcagcttataggcatccgtatcaagcagcgagtgcagtacaggagaagtgaattgtgtcatggtgcgcagtagcatcctctcactggagcgttccatcgaaaccaacgcggaaaatggaggcggagtatacctttattacccgactctgtcccgcgatggcgagcaatggtgacgctgacggtcatttgcgaggcctagtttaatatattgaacatggatcacaccacaagctttgcgtcgggtcgagggcatttcgtgccgcgagtgttaacaaaatgtagcgatttccgtgtttcacgttgaaaagatgaagattctgcatagcgcgattgacacaacaggaatagactgggacgacactttaccgaagatgctaaaggttttttatgacacaacagccccaagccaaataccgccacgactatcgtgcgccggagtatctgattagcgatatcgatttgtcctttgacctggatgccgcaaaaaccgttgttacggccgagagcaaggtctcccgccacgcggctgcgtctgatgtgccattgcgcctggacggcgaagatctgaccctgatcgctctgcaggtgaacggccagccgtggagtgactataaagaagaaaacaatcagctggtgatcggcggcctgccggagcatttcaccctgaccatcgtcaatgagatcagcccggcggcgaacaccgcgctggaaggcctgtatcagtcaggcgaagcgctgtgcacccagtgcgaagcggaaggtttccgccatatcacctggtatctggaccgtccggatgtgctggcgcgctttaccaccaaaattatcgccgataaagcgaaatacccgttcctgctttccaacggcaaccgtatggcggaaggggagctggagaatggtcgtcactgggtacagtggcaggatccgttcccgaagccgtgctacctgtttgcgctggtggccggtgattttgacgtcctgcgcgattcattccgcacccgctctggccgcgaagtggcgctggagctgtacgtcgatcgcggcaacctcgatcgcgcgccctgggcgatgacctcgctgaaaaactctatgaagtgggatgaggagcgctttggcctcgagtacgacctcgatatctatatgattgtcgccgtcgacttctttaatatgggtgccatggagaacaaaggactcaacgtctttaactccaaatatgttctggctcgtaccgataccgccaccgataaagactacctcgatattgagcgcgtgattggtcatgaatatttccataactggaccggcaaccgcgtcacctgtcgtgactggttccagctcagcctgaaagaggggctgaccgtgttccgcgatcaggagttcagttccgacctcggctcacgggcggtgaaccgcatcaacaacgtgcgcaccatgcgcgggctgcagtttgccgaagacgccagcccgatggcgcacccgatccgtccggatatggttatcgagatgaacaacttctacaccctgacggtctatgaaaagggtgccgaagtgatccgcatgttgcacaccctgctgggtgaagaaaacttccagaaagggatgcagctgtactttgaacgccatgacggcagcgccgccacctgcgacgatttcgtgcaggcgatggaagatgcctctaacgtcgacctgtcgcacttccgcctctggtacagccagtccggtacgccaatcgtcaccgtgcatgacgactataatccggagaccgagcagtatacgttgaccatcagccagcgtacgccgccgaccgccgagcaggccgagaagcagccgctgcatatcccgtttgccattgagctgtacgataacgagggcaaggtgatccccctgcagaagggcggtcacccggtacacccggtgcttaatgtgacccaggccgagcagacgtttgtcttcgataacgtttatttccagccggtgccggcgctgctgtgcgaattttcagcgcctgtgaaactggaatacaagtggagcgatcagcagctgaccttcctgatgcgtcacgcgcggaatgatttctcgcgctgggatgcggcgcagagcctgctggcgacttacatcaagctgaacgtcaaccgccatcagcaggggcagccgctgtcgctgccggtgcacgtagcggatgccttccgcgccatcctgctggatgagaagattgatccggcgctggccgctgagatcttaaccctgccgtcagccaacgaaatcgccgagatgttcgcgattatcgatccgatcgccatcgccgccgtgcgcgaagcgctcacccgcaccctggcgaacgaactggcggacgaattcctcgcggtttataacgccaataagctcgacagctatcgggtggagcacgccgatattggtaaacgtgctctgcgcaatacctgcctgcgctatctggcgtttgcggaaccgacgctgggcgataagctggtggcgacgcagtatcaccaggcagataacatgaccgacgcgctggccgccctgtcggcggcggttgccgctgagttgccgtgccgcgatgcgctgatgcaggagtacgatgacaaatggcatcaggacggtctggtgatggataagtggtttatcctgcagtccaccagcccggcagccaacgtggtggaaaccgtgcgcggtctgctgaaccaccgttcgttcagcatgagcaacccgaaccgtgtgcgctcgttaatcggcgctttcgccagcagcaacccggcggcgttccatgctgaagatggcagcggctatcagttcctggtggagatgctgaccgagcttaaccagcgtaacccgcaggtggcgtcgcgcctgattgagccgttgattcgtctgaagcgttatgatgagaagcgacaggcgctgatgcgcgccgcgctggagcagctgaaggggctggagaatctctctggcgacctgttcgagaaaatcagtaaggcgctggcgtaacggtgccataaccccggattgcggcgcgccttgccccctgtccgggttacccgttagcgtggtgatgttgtcgggcggcgcgatgcttacccgacctggaatacacggctgatttggcgttggtagcccggctgtgcaacccgcgagccggggacatgtcggatgacgatatgcccccgttcagatagcggacagttacgccggtcagccatgactaaacaaacgcggcgcacgctcgctgtcgccgcgtttcatcacccgatccagtacttcagcctccagctcggccagcttcgccgaaccggtgcgccgcggtcgcgggatatccacgcttaaatcgaggccaatcttcttctcttcaattaacagcacccgatcggccatggccaccgcttcactgacgtcgtgcgtgaccagcaggaccgtaaagccatgctcctgccacagggagacgatcagctcctgcatctccagacgggtgagggcatccagcgcccccagcggttcgtccagcagcagcaggcgcgggcgatggatcagggcgcgggccagcgcaacgcgctgcttctgcccacccgacagcgcggccggccactcctgtgcgcggctttcaagtccgacgctggccaacgcctgcagggcggcgtcgcgccaggcgccttttagccccagccccacgttatcaatcactgttttccacggcagcaggcgcgcatcctgaaacatcatccgggtgtcgtcctggatcgccgccaggggcgtcgcgccagccagcagttcgccggcgtttggtttttccagacctgccagcaggcgcagcagggtacttttgccgccgccgctgcggcccaccaccgccacaaactggccgctgggaatatgcagatccagctcgttaagaatggtgttgtcgccatagcgtttcgtcaccccgttcagcagcagcgggatacctgggttgagacgggcagtgttcatgcgttagcctcctgaagatgatacgccggattccagcgcagccagagccgttccagcagctgggcgcagacgtcggccagtttgccaaggatggcgtaaaggatgatcgccactaccaccacgtcggtttgcagaaattcacgcgcgttcatcgccagataaccgatgccggcattcgccgagatagtttcggcgacaataagcgtcagccacatcagaccaagggcaaaacgcacgccgaccataactgagggcagggcgccgggtaatatcacgtgacggaacagggcgaagccggataagccatagctgcgcgccatctcaaccagcccacggtcaatattgcgtatcccgtgccaggtgttgatatagatcgggaacagggtgcccagcgagacaaggaagatcttggcggtctcatcgatgccgaaccacaagatcaccagcgggatcagcgccagatgcgggacattgcgcagcatctggatcgaggtatccagcagacgctcgccccagcgagacaggccgctgatcaggccgagtattagcccgatcgagccgccgatggcgaagccgaccagcgcccgccatgagctgatggccagatgctgccacagctcaccgctggccgagagggtccagaacgctttcaataccccctccggcgagggcagcacccgcgtcgacagccagccgacggacgaggccagctgccagacaatgaccgtccctaccggcagcagccagggggcgaggcgtaacaacaggggatgggttgattttgccatcacggtctcctcagctttgcgctactttacgcggaataaactcgttggcgaccgcttccccctgcagacgcaggttttgcggctgcgggatggacggcaccgcgacgtcaagcagggggaacagcagctctccgacccggtacgcctcttccagatgcggatagccggaaaagataaagctatcgatacccagcgcggcgtattcattgatcctttcggcaacggtggcggcatcgcccaccagcgcggtcccggcgccgccgcgcgctaaacccacgccagcccacaggttggggctgatttccagcttatcgcgtcgcccgttgtgcagggccgccatcctttgctggccaacggagtcggttctggcgaaagccgcctgggcgcgggcgatcgtctcgtcgtcaagatgggagataaggctgtccgccgcctgccacgcttcctcgttggtttccctgacgatcacgtgcagacggatgccaaaacgcacctggcgaccatgccgggcggctttctctcgcacctgagctattttctctgccacctgggccggcggttctccccaggtaagataaagatcgacctgctcagcggccagctcctgcgctacctcagacgagccgccgaaatagaggggtggacgcggctgctgcagtggcggaaacagcagtttggcgtcgcgaacgcgctgatgcttgccgttaaaggtgacggtttctccctccatcagcttacgccagatgtgggtaaattcagccgaggcctcatagcgctcggtgtggtcgaggaagacgccgtcgcctgccagttcggcaggatcgctgccggtgaccagattgaacagcgcccggccgtttgacagccggtccagggtcgccgcctgacgcgcggccaccgtcggcgataccacgcttggcctgagggcgacaaggaacttcagccgctgcgtcaccgggatcattgaggccgcgaccagccacgcatcctcacaagagcgtccggtcgggatcagcacgccggtgaagcccagccgatccgccgtctgcgcgatttgctgcagatagccataatcgaccggacgggcgccctcttcggtacccagataacgaccatcaccatgggtcggtaaaaaccagaacatattcagactcatgatttcgctccttgtgtggcggtgggctgccagatgcgggcccggatatcaactttttttggcaccagcttgttctcgtagaacaggtctgccgtctgctgctggcgagcggcggtttcggcgctcaccggggtaaccgcggtggggggacgatggtccagatagctggcgatcaccgcctccggtaagcccatcgttttcgccagcagcgtaatgctttgcgcgcgttggctgtgggtcagggcatcggcctgagtaaaggtgtcgagtacgccttcaatgaaagcgccattgcgttcagcgtagggccgggaagcaagatagaaggatcccgtctgtttcagatcggttccgtcagtgagtacccgggcgccgccctgcagcagcgcggcggagtagtacggatcccagatggcccatgcgtcgacattgccctgctgaaaggcggcgcgcgcatcggcgggggcaaggtaaaccggctgaatatcgctaaatttcagacctgcgagctgtagggcgcgcagcagcagattgtgggagctggagcctttctgaaaagcgacctttttcccttttaactcagcaacgttatgaatcgggctgccctgcgccaccaggatcacctccgccttgggcttgggcggctccgcgccgatatagaccaaatcggcgcctgccgcctgggcaaagataggcggaatatcgccggtactgccgatatcaatgctgccgacgttcagcgcctccagcatctgcggaccggccgggaactcaatccacgagatatgggtttgcggatagcgctgctccagcagctgatggctcttcgccagcaccatgctgacgctgcctttctggtagccgatgcgcagagcgtcaggcgccgccggggcggcgtgacccagcgtagagaatagcagcagtccgcccagagtcagggcgcggagaggattaagcatgctccaccccacgcagagatgttaacgacggcgcacggctgctggggcgatgcagcgcctgccagaaggtctccagggcgtcatcaaggcgccgctgcagattcgcggtaaactgcggcttatgctggtaatcggtcacctggctgtcatcagcgaagacgccatggaggatctcctgggccttgagggcattcagcactggcttcagcgcgtagtccactgccagcatgtgagcgatggtgccgccggtggccagcggcagcacaattttgccctccagcgctcgctcaggcagcaggtcgagcagcgttttcagcgcgccggagaacgaggctttatacaccggcgtggcgatgatcaggccatcagccccggccagctgttcattgagcgtctgcagcgccgggttgtcaaaacgagcgtacaggaggtcttccggggcaaagttctgcagatgccagtggcagacttcgatatcggcggcggtgagcgtctctctggcgtattccagcaaggcgctggaacgggaagggtaacgcgggctgcccgcaagcgtaatgacgcgcatctctctctccttataactaaatgtttgcatttatctataattgataacatttatagtgagtgtgacagagggccattatttccctaaatgatttatccgcggttagatagccgaaaagcgcataatggcgcgcggggtaggtaatcgtttgcgctgatgggggattttttgtcgcaggtcaattccctttccgcaacagatcgcacataatacgcccccggtttgcacaccgggaatccaggagagttcatgtactaccccttcgttcgtaaagccctttttcagctcgatcctgagcgcgctcatgaagttacctttcaacaattacgccgtgtcaccgggacgccgctggaaatgctggttcgccagaaggtaccggccaggcctgtcacctgcatggggctaacctttaaaaacccgctgggtctggcggccgggctggataaaaatggggaatgcattgacgcgctgggcgcgatggggtttggttcgattgagatcggcaccgtgacgccgcgtccgcagccgggcaacgataagccaaggatcttccgtctggttgatgccgagggattgatcaaccgcatgggctttaataaccatggcgtcgataacctggttgagaatgtgaaaaaggcgcattttgacggcgtgctgggtatcaatatcggcaaaaataaagatacgccggttgagcacgggaaagatgattacctgatttgtatggaaaaagtctatccgtacgccgggtatatcgccattaatatctcctcgccgaataccccagggctgcgcacgctgcaatacggcgaagcgctggatgatttactctccggtattaaaaataagcagctcgagctgcagcagaagcatcaaaaatatgtcccggtcgccataaagatcgcgccggatcttttgcctgaggaattgatccaggttgccgatagcctcgtgcgtcataatattgatggcgtgattgcaaccaataccaccctcgatcgttccctggttcagggaatgaaacattgcgatgagaccggcgggcttagcggtcgtccattacaattaaaaagcactgaaattatccgtatgctctccgctgagctgaatggccgtttgcctatcatcggcgtgggcggcattgattcggtgattgccgcgcgggaaaagattgccgccggggcatcgctggtgcagatctattctggatttatttttaaaggtccgccgctgattaaagaaattgttacccacatctaatcttttcctcctctgaatcccacccagggctttatttccggccctggttgttttatattccctcactgttgcttatttaaacattttagacttttcttaattttagaaaatattctgcggtaagtcgcaacaactttgcagaggcgtatgaaaggggacagggggaaaaatgcggattaaacctgacgataactggcgttggtattacgatgaagagcacgaccgcatgatgctcgatctggccaatggcatgttatttcgctcgcgcttcgcccggcgcatgctgactccggatgcctttgccccttcgggattttgcgttgatgacgccgcgctctatttctcttttgaagaaaaatgtcgcgatctcgagctatcgaaagagcagcgggcggaattagtccttaacgcgctcaccgccatccgttttctcaaaccgcagatgccgaaaagctggcactttatcgcccatacccatcactggcagccgagcggcggcgacgccgcctgcgtttggctgagcgataccggcgagcaggtgaatttactggtggtggagccgggcgataacgccgcgctctgtctgttggctcagccgggtctcacccttgccggccgcgtcatgcagctgggcgatgtcattaaaatcatgaatgacagactgcagccggcgcagagcgcggtcagctacagtctggggcaggcggtttaaggcgccaggcgtagcgctgttttcggtacacagctgcaggcgagaatagtgccatctccggcaaccgcgtttttctttaacggactcacttctccctcttccagccggatgcggcagctgccgcagatccccgcccgacacgaatagggtacgcgaatgccctgttgttccagttgctccagcagcacctgctggttattgccggtaaactgttgaccctgccattcgatggcaaccgtagcctgctgctgcgcctcgggagccggggtatcgtcgctttcacctgccccgtaggctttcgccgggccgcgggtaaggatttccacttcatctcccacccggatcaccccgctgttgcgggcaatcaggttctggccaaaatcgacatcgccattgtccagggcggtacgaaaacgctttaaggtttccagcggctccccggcgggatgcttctgaccgcgctccgggctgatggtggtaaaaatgcagcggctgcacggcttagcgacgtcaaacaccacctcgccgatgcggatcactttccagctatcttcatcccaggccgccgcgccggtgaccacaaggttagggcgaaactgttctatgcttacgctggccgggcagcgctgttgcagatcgcgcagggaggcctcgttagccagcaggtaagggtagccgtcggcgaaggagagcggcaccgcatcatggcgctttacccggcgggttagctgcggccccagccagcgcagctggacatcgcgcttgaaaaagccgctgagccactggttaacggcggcgggcgcgatgagggcggtaaaatggttgccccagacttcggtcggctcggcctgcgtggcgaaatcgctaaaacgcaccacggcgctgctgccgtccggtgcgctcaggtgaaggccatcatgcagcggcgccggaataaatttcaccatttgcggaaactggcgagcggtaataaaggtcccgtcggtttcggtgaccataaacaggcgatcgaaggccaggccgctgatatcagcaaaggcgtgggtcaggcctatgccgcgcatggatttaacaggatgaataaaaagtcgcgatagcgttaccatacgctgcctccgggttccaaaaataagcctataactttatgacatagggcacatattggctataatgcgcaccaattttctttaagtaaaagtgacgatatgaattctctgtttgccagtacggctcgtgggctggaagagctgttaaaaactgaactggaagggcttggcgcgacggactgccaggtagtccagggcggggtccattttcagggggatacgcgcctgctgtatcaaagcctgatgtggagccggctggcttcgcgcatcatgctgccgctgggcgaatgtcgcgtatacagcgatctggatctgtacctcggcgtacaggccattccgtggacggagatgttcaaccctggcgccaccttcgcggtgcattttagcggcctcaatgacgagatccgtaacagccagtacggcgcgctgaaggttaaagacgccattgtcgacagcttcacccgtaagaatctaccgcgcccgaacgtcgatcgtgagtcgcccgatctgcggatcaacgtctggctgaacaaagagacggcgcacatctcgctggatctgagcggcgaaggcctgcacctgcgcggctatcgcgatggtaccggaatggcgccgatcaaagaaaacctcgcggcggcgatcgtcatgcgctctggctgggtaccaggtacgccgctgctcgatccgatgtgcggctccggtaccctgctgattgaagcggcgatgctggcgaccgaccgcgcgccgggcctgcaccgcggccactggggctttggcggctgggcgcagcacgatgacgccatctggaaagaggtgaaggcggaagcgcaaacccgcgctcgtcagggattggcagcgtatgagtcacgcttctacggctcagacgtcgacgcgcgcgtaatcgagcgcgcgcgccgcaacgcccgccgcgccggcattggcgagctgatcgattttgacgtgaaagacgtcgcccaactgaacaacccgctgccgaaaggcccgtacgggacggtgatcagtaacccgccgtacggcgaacgtctggaaagcgagccagcgctgatcgctctgcacagcctgcttggccggataatgaaaagtcagttcggcggctggaacctgtcggtattcagcgcttcgccggagctgctgagttgcctgcagctgcgtgccgacaagcagtttaaagccaagaacggcccgctggactgcgtgcagaagaattatcacctggcggagagcgaaggcggcaagccggcgatgctggcggaggattttgctaaccgtctgcgtaaaaacctgaagaagtttgaaaaatgggcccgccaggaaggaatcgaatgctatcgcctgtacgatgctgatctaccggaatacaacgtggccattgaccgctatgccgactgggtggtggtccaggagtatgccccgccgaaaaccgtcgacgcgcataaggcgcgccagcgtctgttcgacatcatcgctgcgactatcgccgtactggacatggcgcctaacaagctggtgctgaaaacccgtgaacggcagaaggggaaaaaccagtatcagaagatggcggagaagggcgactttattgaggtacaggagtataacgcgcgcctgtgggtcaacctcaccgactacctggataccggtctgttcctcgaccaccgtatcgcccgtcgcatgctcggccagatgagtaaaggtaaggacttcctgaacctgttctcctataccggcagcgccagcgtccacgcaggcctcggcggtgcgcgatccaccaccacggtggatatgtcacgcacctacctggagtgggcggaacgcaacctgcgtctcaatggcctgaccggccgcgcgcatcgcctgatgcaggcggacgtgctgggttggctgcgggagagcaccgagcagttcgatctgatctttatcgatccgccgaccttttccaactccaaacgaatggaagatgcgtttgacgtccagcgcgatcacattcgcctgatgaccgatctaaaacgtctgctgcgtaaaggcggcaccattatgttctcgaataacaaacgcggtttccgtatggatcatgacgggctggcggcgcttggcctgaaggcgcaagagatttcgcaaaaaacgctgtcgcaggattttgcccgcaaccgtcagatccacaactgctggctgattaccgcagcctgaaaggaataaataatgtcactgattagtatgcacggcgcctggctttccttcagcgatgcgccgctgctggataatgccgagctgcatattgaagataacgaacgcgtctgcctcgtcggacgcaacggcgccggtaaatctaccctgatgaagatcctcaaccgcgaacaggggctggatgacggaggcatcatttatgaacaggacctgatcgtggcgcgtctgcagcaggatccgccgcggaacgttgctggtacggtgtacgattttgtcgccgaagggatcgccgagcaggcggcttatctgaaagcctaccatgacgtgtcgcatcaggtgatgaccgatccgagcgacaaaaatttaaatgaactggcgcgcctgcaggagcagctcgataacctgggactatggcagctggacagccgcattaacgaagtgattgagcagctgggccttgacgccaatgcgcagctggcgtcgctgtccggtggctggctacgtaaagcggcgctgggccgcgccctggtcagtgggccgcgcgtgctgctgttggatgagcccactaaccacctcgatatcgaaaccatcgactggctggaaggtttcctgaaaacctttaaaggcacgattatctttatttcgcatgaccgttcctttatccgcaatatggcgacgcgcattgtcgacctcgatcgtggcaagctggtgacctatccgggaaattacgatcagtatctcctcgataaagaagaagccctgcgggtcgaagaactgcagaatgcagaatttgaccgcaagctggcccaggaagaggtgtggatccgtcagggtatcaaagcgcgccggacccgtaacgaaggccgagtccgcgcgctgaaggcgatgcgccgcgagcgcggtgagcgtcgggaagtgatgggcagcgcgaagatgcaggttgaggaggcttcccgttccggcaaaatcgtctttgagatggaaaacgtcaactatcaggttgacggcaaagtgctggtgaaggatttctccgcacagatccagcgcggcgacaagatcgccctgatcggccccaacggctgcgggaaaaccacgttgctgaagctgatgctcggccagctgcaggccgacagcgggcggatccatgttggcaccaagctggaggtcgcctacttcgaccagcaccgcgcggagttggatccggataaaacggtgatggacaacctggcggaaggcaaacaggaggtaatggttaacggtaaaccacgccatgtgctgggttatctacaggacttcctgttccatccaaaacgagcgatgaccccggtacgtgcgctttccggaggggaacgtaaccgcctgctgctggcccggctgttcctgaaacccagcaatctgctgatccttgatgaaccgactaacgacctcgatgttgaaacgctggagctgctggaagagctgatcgatggctatcaggggaccgtgatgctggtgagccacgatcgtcagtttgtcgacaataccgtgaccgagtgctggatcttcgaaggcggcggtcgtattggccagtacgtcggcggctatcacgacgcccgcggtcagcaggcccagtctttggcgcaaaagcagacggtcgttaaaaaaacgacggaagtcgctcagccaaaagcagaaactgtcaaacgcggcgggaacaaactaagctataacctgcagcgcgagctggaacaactgccgcagaagctggaggctctcgaggccgaactgcagacgctgcaggatcaggttgccgatcccgatttcttcgggcaaccgcacgatcgcacgcagcaggtgctggcgcagctggccgaagcggagcaggcgctggaagcggcctttgaacgctgggaatatctcgaaggattaaagaacggcgcctgagccgaggagttgtcatgtgcgatcatcatcatgctgcgcgacatattctatgtccccaatgtgatttgctggtggctttgccgcagcttgagcatcgccagaaagccgcctgcccgcgctgcggtacaacgttaaccaccacgtgggacgcgcctcgccagcgtcccacggcgtatgcgctggtcgcgctgtttatgctgctgctggccaacctgttcccttttatctatatgaaagtgggcggcatcagtagcgaaatagagctgctggaaattcccaacgtactgtttaccgaggattacgccagtctcgggactttctttttactctttgttcaattagtgccggcgttttgcctggtcaccattttgctgctggttaatcgggtcagaatgcctgccggcctgaagacgttccttgcgcgaattctctttcaactgaaaacctggggcatggcggagatctttcttgccggcgtgctggtgagcttcgtcaagctgatggcctacggtgatatcggcatcggtctgagctttgttccctggtgtatgttttgcctgctgcagttacgtacttttcagtgcgtcgaccgccgctggctatgggatgatattgcccccatgccggccattacccagccgctgaaggtcggggtgaccggtatccgtcaggggctgcgctcctgtgcctgctgtacggcggtgttgccggtcgatcagaccgtctgcccgcgctgtaacagtaaaggaacggcgcggcgcaaaaatagcctgcagtggacgctggcgctgctggtgacgtcatttatcctttatctccctgccaacattatgccgatcatgatcaccgatctgctgggcgataaaatgccatcgaccattatggccggggtgattttactgtggagcgaaggttcttatccggtggcgctggtgatctttatcgccagtattatggtgccgacgctgaagatgatcgctatcgcctggttgtgctggaacgccaacggcaacggcgcacgagattcggagcgcatgcatctgatctatgaggtggtggaatttgttggccgctggtcaatgattgacgtttttgtcatcgccgtgctctctgcgctggtccgcatgggagggttaatgaatatctatccagccatcggcgcggtcatgtttgcgctggtggtggtgatgaccatgttttcagccatgacatttgatccccgtttactgtgggatcgtgagccagattcaagccatgaggaaatacaacaacatggaaaataagagcggagaagcgaaagtgcagaaggtgaagaactggtcaccggtgtggatcttccctatcgtcactgcgctgatcggggcatggatcctgttttatcattacagccatcaggggcctgaggtcacgctgatcaccaccaatgcggaagggattgaagggggaaaaacccgcatcaagagccgcagcgtagacgttggggtggtggagagcgcgacgctgaccgacgatctcacccacgtggaaatcaaagcccgcctcaattccgggatgcagaagctgctgcacaacgattccgtcttctgggtggtaaagccgcaggttgggcgcgaggggatcagcggtcttgggacattgttgtccggggcctatattgaactgcagccgggaacgaaaggttcggtgccagcgcagtatccgctactggattctccgccgctggcctcgccggatgccaaggggatccgtattctgctggaaagcagcaaggcgggccagctgtcgccgggcgatccggtgttgttccgcggctatcgcgtggggtcagtggaaaccagcaccttcgacacgcagaaacgtcgtataacttaccagctgttcatcaatgcgccgaacgatcgcctggtgaccaccaacgttcgtttctggaaggacagcgggatcgctgtagatttgacctcggcggggatgcgcgtcgagatgggctcgctgtcgacgctgtttggcggcggggtgagcttcgatattcctgaaggactggacctcggcgagccggtggcgaataaaacggaataccatctgtttgacgatcagaagagcatccaggattcagtctttaccgagcatatcgattacgtcatgttcttcaaagactcggttcgcggcctgcagccgggcgcgccggtggagttccgcggtatccgtctgggcaccgtcggcaaagtgccgttctttattccggggctgaagcagcgtttgaacgatgactatcgtattccagtggaagtgcgggttgaaccgcaacggctgattaatcagcttggcggcgatccgaatattcgcgcccacattgacgatctgatcaaccgcggactgcgcggctcgctgaaaactggtaacctggtgaccggcgcgctgtatatcgatctcgacttctatccgaaggcgcccccgcgcgggaaaatacaggagtttaacggctatccgattatcccgaccatcagcggtggactggcacagatccagcagcgtctgatggatgcgctggataagattaataacctgccgattaatccgctgctggagcaggcgaccagcaccctggcgcagagcgagaagacgatgcagcacgtgcagaccacgctggataatctgaataagatcacctccagccagtcaatgcagcagctgcccgccgatatgcagacgacgctgcgtgagctgaaccgtagcatgcagggcttccagccgggctctgcggcctacaataagatggtggccgatatgcagcgtctggatcaggtgctgcgtgagctgcagccggttctgaaaacgctaaatgataagagcaatgcgctggtatttgaggcgaaggataaaaaagatccacagccgaagggagcgaaataatgaaaaaatggttactggcggcagccgtatgcgtactgacggcgtgcagtatcggcggggaaagcaagacatactatcagctaccggttgtgcagggcggcgcgcagagcgccgccagtcagggggcacgtctgctgtgggtagagcaggtcagcatcccggattatctggcgggtaacggggtggtctatcagaccaccgacgtgcagtatgtgatcgccaataataatctgtgggccagtccgctggatcagcagctgcgtaccacgctggtggcaaatctcagccagcagttgcccggctgggtagtgtcgtcccagccgctggggagcgagcaggataccctcaacgttgcggtcaatggctttcatggtcgctatgacgggcgggttatcgttagcggtgagtggctgctgaagcatcagggacagctgattaagcgcccgtttaacatcgtcctcaggcaggaacaggatggttatgacgcgatggtcaagaccctggcgcaggcgtggagccaggaggcggctgccattgccagcgagcttaatcgtctgccataagtaaaattcatcataatgacctgccgcgcggttcacctgggccgcgcggcattttttttgccaggtcagttcgttaccggcggctgcgccgagcgaacaaaaaatgaactcttatataggtcacaaatatgacactggcgtgaattttgcgcattgacgttgccttcttttcgcggtattcgtaacccgtggctgcacaatttgcgaccactgttttcttttccaccagatcaaagaatgagggaaacgaggcatgaagagacaaaaacgagatcgcctggaacgggcacaccaacgcggatatcaggcgggtatcgcgggaagatcgaaagaaatgtgtccataccagagcctgaatcaacgctcatggtggctgggaggctggcgagaagccatggaggacagggtactaacggcctgacactgtctctttaaaaaagaagcctccgcatagcgggggcttcgccttttaattgctactgaatgttatcagaaagcggaagtatcctggaacagacccactttcagatcgttcgcggtgtagatcagacgatcgtcaaccagcacttcaccatccgcaagtcccataatcagacgacggttaacaatgcgcttgaagtggatgcggtaggtgacttttttcgcggtcggcagaacctgaccggtgaatttcacttcgccaacgcccagcgcgcggcctttgccttcgccgcccagccagccaagatagaacccgaccagctgccacatagcatccaggcccaggcagcccggcatcaccggatcgccgataaagtggcaaccgaagaaccacaggtcaggattgatgtcgagttctgcctcaacataacctttatcgtagttaccaccggtttcggtcattttgatgacgcggtccatcatcagcatgtttggtgccggtaactgcgggcctttcgcgccgaacagttcaccacgaccagaggcaagaagatcttcttttgtataggattcgcgtttatctaccatgttttcagtaagccttattttaagttcgggacgcaggatagctaacacgtgtaagctgaacaagtccgatcagttagaacttgtcccgcctaaccagcgtagcggccacggaaaacgatggcgagtctcttgctgggtcgcctgcgctatccgctcctgaatggtttgtcgcagcgtctgtccttcaccgtcccacatcagctgggtcaacatcggcagcgcttcggtaatatcgtcaatggcccagatagcaaactggttgtcggcaacggcctgacgtagctcgtggctcaggctgagatgacgaacgttggcggcagggataatcactccctgtttgccggttaaaccgcgctgctgacagatagtgaagaagccttcaattttctcgttcaggccgccgaccggctgcacgcgaccaaactggtcgacggagccggtgatcgcgatgctctgatttatcggtacgttggccagggcgctgattaaggcgcagagttccgccatggaggcgctgtcgccatccacttcactgtaggactgctcaaaggtcagcgaagcagtgaagggaagctgctgctccagctccagctcggacatcagaaaagcctgcatgatcatcatgcctttcgcatgaatgttaccgcccagctcggctttacgttcgacgtcgataaattcgccatcgccaatgtgcacgacgcagctgatgcgtgaaggttcaccgaacgcgcgtggatgaccggggaattcgatcaccgacagggcgttgatctgcccgacgcattcgccttcggtttcaatcaggatctgttcctgcaggatttcatcctgcatacgctccgccaggtagccttcacgccatacccggcgcgccagcatggtctgcatcgcttcgccggtaatctcctcgccttcgcagaaggcggcggcttcccgcagctggcgggttatccatagcggactgagcggcagggtctcctgatcgccggtatagcgcgttccctcatcgatcagcagaggccaggcatcggctgccgggcccggcagctccagctgctgcgcattctgccatacccactggcaccaggcctttagcgtgtcggcgtcagcaaactgcagagtgtcttcatactcgctatagatcgcctgcgcagccagctccggctccatttcctggaaatcggccagcgattcgcgttcgcccaccaggatgattttcagactcagcggcatggagggaatgctgaccggcagcggacgcgattcatccatagaaagccagtcaaagcgctgacgagtcaccatatttttcagacgcacccacagcagcggttgcgccagcagtgtacgtagcgaaagcacaagcacgccgccgttggcctgatggaccagcccaggctggagggtgattgcaccgttaaactggcgtacgcagccaaacagctgttccgcttctacccaatcggccatcacgaccggggcagtgctggcgaaattatcctcagcgccctgcgccggtgcgagcgtcacctgagcgtcggttacctcatagcggacgccgtaaagcggtgcggcaggctcgtgcagagtccgggtttcagccgccagccattgcagatattccggctcttcaggggctttcaccagcatgaaggaggagactgccggcgtgtacagcagctgctcaagcccatagaacaaacgcggctgcagatcgcccgagagggagggggccggatgggaaagttcagcttgagcaaacagcgcctggtaagcttccagatcaggcgcaaggtcggttcgggtcagtttcgtaatggtcaaagtcgctgttttttagttagatgtaaagcgcgcaattatacctgatgccgcgaccgagcacacggaggattatggttaccctgatgattacccggtcgcagacttcacgaataatgatttatattcagcacatcagaaaaaaactgatatcctgaaatgagttacacggtcacattgagatcgcaatgaaatatcaacaactggaaaatcttgaaagcggctggaaatggaaatatctggtaaagaagcaccgggaaggtgagctgattacccgctacattgaggccagcgctgcgcaagctgcggtagatgacttgctgacgctcgagaatgaacctgtgctggtgcatgcctggattgagcagcatatgaatccggcgctgatgaaccgcatgaagcagactatccgcgcgcgacggaaacgccattttaacgctgagcatcagcatacgcgtaagaagtctatcgaccttgagtttgtcgtttggcagcgtcttgctggcctggcgcagcggcggggcaaaaccttgtctgaaaccatcgtccagctgattgaagatgccgagcacaaagagaaatatgccagcaaaatgtcgagcctgaagcacgatctgcaggtactgttagggaaagaatagccaggtaggatcgtcgacccgcctgctggtggttgccctggccgggggctgcttcacagctctcagccgctgaagtgggcgagagggcataaaaaaaacccgccgaagcgggtttttttatcggttataacttaagccgccggctgagttacaacttctttgtagcctttaacttcgatctctacacgacgatccggagccaggcaatcgatcagggcagcgcgagctttcacgttgtcgcaggtgttgccagtaaccgggttggattcacccatgccgcgagcggagattttgccagccgggatgcctttagcaaccaggtagtcaacaacggactgagcacgtttctcagacagctgctggttgtaagcttcggaaccgatgcggtcggtgtagcccagaacaacagcggaaccgtctttcggatccatgttgctcagctgagtgtacagctgatccagagcctgctgaccttccggtttcagggtagctttgttgaagttgaacagaacgtcagacttcagggtgaagtgcttggtagccacttccggagccggagccggagccggagcaacaaccggtgcagcatcttcctgaccgaagcggtaggaaacgcccaggctcagcatgccgttatcaggacgggtacccacagtgcccgcgtcgccgatgttgttaacccactggtattccagacgggtagcgatgtcacgagtaacagcccactctacgccgccagcaaatactggggaaacgccagtgtcgtgttcgctacgggaaacgccggtagaagcgtagttgcctttggagtcagcgcgccaaaccatgccgcccagacgggtgtagatgtccagatcgtcagtgatcgggtagcccagtttagcggtcagctgaacgccctgagctttgaaagcaccgttgtcaacgctgcctttatatgccatacggcccagccagtcataacccatttcgaaaccgaggtacgggttaacctggtaaccaccgaacgcaccagcaccaagctgatcgttacgggtcggaccgttgttgttctggaaaccgttaccgtagaaaccggtgtcgtgatactgggaccaacccagtttaccacctgcataccaggtgttatctttcggagcggcctgcgctacggtagcgaagccagccagtgccactgcaatcgcgatagctgtctttttcattttttgcgcctcattatcatccaaaattcgccatgaagttacaaaagacctcacggttaaatccttcaccgggggcgtgacttgttgttaactatgctgatacatgcagcgtaagccgatcacccctggcgatgtaaagtctacaacttagttcgaaacttacaagtgtgaactctgtcaggcatatgaaaaaaaagggttgtgtacacaatatttaacaaatatggttgattttcgtacacgaaaaaaagacagaaatccccgtgtggcaggcattccgcgaaaaagaccataaaaaacgctgtacctttcccagcggtaaaaaaaattccaggaataatcctaatttcactcaatgatacaaatttgagtgaatttttagcccgctgagttgtctgccgagcgtgccctgatttcgcaccgggcgcatgatgaatcccatcgcggaccctacctgggcagcgttaacgagacgttcgtgttcgtcagcggttaactcctccgccagccagcagataaccacactataattacccgtgcgcagggcacggatcattgagtctatggtatggctgggagagagctggctaatttgcatgaccttggacagcggcagaccggcggactgaacccattcgcggctgagcttttgttgcggcgtgagccacagctgccagcgcgactgttgacccagctgctgtaataaaggtagcagcaataactgcgtcatcatgggttgatcttcacgatagacaatttcactgatcagcccattggtgttctgttcgccagaacgatgagcgtagtggcctgccggagcagaagcctgtgctgaacggtttgcgtgagctgaagtaaacatagtctatgccgcctttagttactgtatgcatatacagtatcttcgccaggggaaaagatcaaccgcaatttgccattttgctgccgggaatttaatcgcttctcgtggttccttatctgtcaaaagaagcccctgcattatccaatccttaacgcgcgctaatggtttcatttctccctgtcgattgctgcaacgcttgcgattttctgaaagcgtctcgcaaaaccgcattctggtgaaaaagtcggcgaaaatcatcttgctgctgcccgggaagtcccttatgttttctcttagcggatccgttaacaacttaagtttaattacatgattaacaaaggaatgatcatgagaaaactagtttgtccgcggctcccgcaatttcaggcctgcgtctcaccgctgggtcaactgcatactcgtccgctctttggcggctacagcctggctattgatgatacggtgtttgcgatggtggccgaggggaacatttatctgaaggcctgcgagcagagcgctgcttatcgggtggaacatcgtaatcctctgttaacgctgcgccgacacggccgcatagtgccgctgaagtattatcaaattgacgacactttatggcgcgatgagcagcagctttttcggctatcgctactgtcgtggcagagtgcgcagcgcgaaaagaactgccgacgggcgtcgggccgcctgaaggatttacccaatatcagctttcatatggaattgcagctgattcacgcgggcataccggacgttaggacgttgcgggaagttggtgcgcaggaggcatggctgaggctacgcgtaaataatgcttctttatcgctgagcgtattgctggcgctggagggggcgattgccggggtacatgccgccgcgctcccgacgccacggcgtcaggagcttctcgaatgggcggctacccggtagcggaaaagccttgttattcggtttgggcgtggacccgttgctgcaggcggcagatttcaggcagcagcgccagcagcaggccaatctgctgtaagaccaagggttccttactgtccgcgcgcggttccagatgatggatccggctttgcaggctgttcaaagcctgttgcacccgctgttcatccgcgggggtatggtgcaaggcgtcatccacataacagactgcatcatccagcagggcgaggatttccggcgtggacagtttttcccgatgcgcgccaagagcggagatgtagctggtgaacgtgtggttgaggcatagcagacgaaaggcggtttctcgctgggtggcatccgcgcgtggttcagtcgataagttcgagacgacggaggccagctcagcatcacggttgtaggcgtcacgacgcgcgacacggtaggccagccggttgtcgcggccctgatgatactgctccagaatcgcgtccagatagcggcagttcgcgttcattgcccggtccagcacccgcggcaggttgcgaaatttccagtccggccagatgaagctgaccgctgcccaggcgatggcgcagccgatcagcgtatcaatgatacgcggcagcgcgacttcaaagccctcgccaagcaggttaaagcacagcagcaccagcagcgtaataaacatcgtggcatgggcgtactgcacgttacggaaggcaaaaaacagcacgccggtcaggacgatcaacagcagttgcccttcaacagagggaaccagcagcaggaccggcaggccgatcgccaccccaaccagcgtgccgataatccttagcgccaggcgatggcgggtggcgttatagttcggctgacagacgaacaggctggttagcaggatccagtagccatgctggagcccggtaaactggataaaggcatagccggcgcagagcaccaacgacatacgtactgcgtggcggaaaagggccgactctggcgacatattgcgctgcaggcgcagccagatatcgctcagaccgccgagtctgtcgtcggccagcagcgtctcggtattactcccggcaggcgcggtggtttgcatcgattcaatggtggccagctgagcatcgatagcgcgcaggttattcagtaaatacccgagggcgttgagctgctcgtcggatgcgccgccggcgcgcacgcgctcaagtgccgcatcgagatgcatgaacgcccgttcaaaatgggcatcatgctgatagggttcgcgtaacagaatcgcccgcgacagtttctggcaggcctgcgcctgcatcgaaagcatacgctggaaacggaacatcacatcgctatagcgaaattgatcgcgtagggtttgatactgaatatgcgatgagctggcgcgttcatgaatatcctgggccacaaagtagtactgcagggtgcggcgggtgccgcgctgaccccgatcgcctcgcagtcgggttagcagcgagaccttggtttggttaagcgtagctaccagctggccattagcgagcgccagatcgtacagcggcgcctggctctcatcctcaaggtcaggatcaaacagccgggatttgagctcaagatagcgggccagctgctcatagctacgcgccaggttgtcctgcaatggacgaatcggaaagatcaggtgcccggacagcgtcagcaggttgtaccacacggcccccgccagcaggaacaacggctgcagataccaatgatcgtacagcgtgacgccgagcatggtgtagatggcgataagcagggcgccgaaggcaatggtcgcatagcgctgaccgaggccgccaagcaaaataaagccgatggtagacacggtcaaaccaagggcaaacagcggcggccacggaaacagcagctccacggaggcggaggcgataaaaaagcataccagagtaatggcaagattacgcagacggccggccagacggtcgtcaaggtcggtcagagccgcagccacgacgccgagggtgagggggatggtcagtttgacttcgccgatccaccagggaaacagcgttgtgccgcagagcgcgataaaaattcgtacgttataaagccaggcgctgttccaggtgtagcggcgtagcagggggctaatcatgtccgtgttccgttcggttactgaaagcgacgacgtgcattggcttcacgcgcagcacgcgcggtttccacagaaacgacccggcgacccaccggccagagggcgatggcggcgattttgaaattcgcgatccccaccgggatgcctatgatagtcaggcactgagctataccgctgaaaatgtgcatcaggcagagccaccagccgaaaaaaatgaaccacagaatgttcagaacggtaccgccggcgttcagtagaccgtttttgcgccccggctcgagctcgtcaacatgaatcgcctcgttaccgtagggaaataacgaaaggcgagtgatttcccagcaggaacgagtcagcggcagcgtgacaatcagaatgatgctgaccagggtggcgagtagccagcctagagtggtggcgaaaccgccaaggataaagttcaaaatattcagaatggtacgcataaagcctcggttttgcccggtggataataagacctgatgattgtaacgtttttttgcgctggagcacctggtccggggcggttaaactgaaaaacaatccaccctgattgaaaatcgacattatatggaacttaaagcgacaacattgggcaaacgcatggctcagcacccttatgatcgggtgcagctactgaacgccggggtaaaagtttccggcgatcgtcatgagtatcttatccctttcaatcagttattgtcagtgcattgtaagcgcggtctggtctggggcgaactggagtttgtgctaccggacgggaaagtcgtgcgtttgcacggtaccgagtggagcgaaacgcagcgcttttatcatcatttacatacgctctggcagcagtggagcacggagatgagcgatatcgccgccggcgtgctgaagcagcagctggcgacgatcgagcacactcgcgcagaaggcaagtggctaacccgtcagcaggtggcggatgttcaggataatatacgccatgcgttgactggtttgccgatgcccaccagtcggcttgatgcctttgataactgccgggagctgtggcgggagtgtcagcgctggttaggcgatattgaagcgacgcgtctggcccataaccaggcctttaccgaggcgatgctggagcaatatcgcgaattttttgatagcgttgagtcgtccccgctcaatgcgtcacaagcgcgtgcggtagtgaacggcgagcgctccctgctggtgctggcgggagcgggcagcggtaaaacctcggtgctggtggcgcgagcgggctggctgctggcgcggggagaagccgcggcagatcaaattttgctgctggcattcggccgccaggcggcgcaggaaatggatgagcggatccgcgagcgtctggcatcagatgatattaccgcgcgtactttccattcgctggcgttgcatattattcagcagggcagcaaaaaagtgcccactatcagtaagctggaaagcgatactgcggcccgccgcgcattgctgctgaaaagctggcaaaagcagtgccaggagaaaaaagcgcaggcgaaaggttggcgcctgtggctggaagaagagatgggctggcaactgccggagggggacttctggcaggacaaaaaggtgcagcggcggatggccggccggcttgaccgctgggtgagcctgatgcgcatgcacggcggctcccaggcggagatgattgccggggcgccggaagcggtacgcgacctgttcagtaaacgggtgaagctgatgtcgcctctgatgaaagactggaaagcggcgctcaaggccgagaatgcggtcgatttttccggcctgatccatcaggcggtcaatattctcgataaaggccgcttcgtcagcccatggaaacacattctggtggatgaatttcaagatatttcgccgcagcgagcctcgctgttggccgcgttacgccggcagaatagccaaaccacgctctttgccgtcggggatgactggcaggcgatctaccggttcagcggggcgcagctttctctgaccaccgcattcaaccactactttggcgaaggggattgctgtgcgctggataccacctatcgctttaacgggcgtatcggcgaaatagccaatggctttatccagcaaaatccgcatcagttaagcaaaccgctgaacagccttatggcaggtgataaaaaggccgtcacgctgttagccgacgacaagctggacgatcttctggataagctgagtggttacgttaagcccgagcagcgcatcctgctgcttgcccgttatcaccatctgaagcctgaggcgctcaacaaagcggcgacgcgctggccgcacctgcagcttgattttatgacgattcatgccagcaaaggtcagcaggctgactttgtcattgtgttgggactgcaggagggggaggatgcgtttccggccccggcgcgcgagtcgattatggagcaggcgctcctgccgcagccggaagattttccggatgcggaggagcgtagactgttgtacgtggcgctcacccgcgctcgtcaccgggtatggctgttatttaacaaggcgcaaccttcgccgtttgtcgagatcctgcaggcgctggatgtgcccatggccaggaagccgtaatcgcggctcgattatttcaggcgctcggcaagatagcgtggataatccgggatcagaatatctagcggttgaccgaagtgcggcgactggataataaagtcagcggtggagacgttagtggcgaccggaatgttccagacggtggccaggcgcagcaacgctttgacatccgggtcgtggggaacggcgttcagcggatcccagaagaagatcagcacgtcgattttgccttctgaaatgagggcacccacctgctggtcgccgcccatcggaccgctcagcatggcattaacctccaggccggtagcccgggagacgagattaccggtagtgccggtagcatacaaaatatgttgcgccagcagcgcctgatggcgagcaacccatttcatcagcatatctttgcagtgatcgtgagccaccagcgcgatatgtttttgcgcaggcagggtacgtgttgtcagttccatattttcattccacattttgacctgcaaacagattactgaatgtggctgtcgctgcaagcatcggggatgaaaattttgctgaatctgtgggttaggctggatggccccctgctgcggattagcatacacttaggtgaaatagcaggaggaaaccatgaaagagaatgatattgctggcatcctgacctcgacacggacgattgcgctggtcggagccagcgacaagcctgaccgtccgagctaccgggtcatgaagtatctgctggatcaggggtatcacgttatcccggtttcgccgaaggtggcgggcaagacgctgctgggacagcaggggtatgcgacgctcgccgacgttccggaaaaggtcgacatggttgatgtcttccgtaattcagaagcggcgtggggcgtagcgcaggaggcgatagccatcggcgcgaaaacgctatggctgcagctgggggtgatcaatgagcaggctgcggtgctggccagggaagccggattgagcgtagtgatggatcgctgcccggccattgaactaccgcgactagggttggcgaaataaaataaaaccccgcgttagcggggttttttattcccttcttttaaggagtaattgcgggtgatttatttctgttagcgaaacgtttcgttattcgctttataattctgtggttaaaaataaccttatcgaagatggtgtttttatttcattgcgatgaccatattaattatgcggtttaataaaaaacggtctaatgcgatcttgttttcttatatagttaggcatgttttaaataaggttattactgctgtaaaattttttaattattaaaaaatgtctgtgttaaaaccgtgctgatttcgtgatgtgaatcacggtttttttttgtgatctataaagagaaagaagaaaagatatggcgtagcctgaaagtataattttttatccagagggttttgtaatgagatgcaaacctggcatgagaaaaacatgagatgtcaaaatgtggtgattttttattatttcaatatttatcaataacttagcgttatttcaatatatttcatttttgtttcttaacttcctttcgggtccgtagtttctggtatatctaataagatgcataagtaagaattatctcaaatctctggctgcgtcttcatcccaagggtgtgtcctgatgaaaaatataaatatcacagcaaaagatacaggtgtgaaatacaccgtcgatggcaatcaagttaacttaaacacgcagtcagttgttgtgttgcatattaagcgagaggacatcagttccttctccaggcaaggtaatgatcttgttctaaaaataaacgacggcagtactcttacgctgaaagacttttttgtgaatgatgctaatgggcatcatagcgatttagttttacaagatgacgatagtggggctctgtggtggcttgaaggggcaggaaccagcgatgcccattattctctcatcagtgatatctcaggattattagctgcaggcagttctggtggcagcattgctccatgggtaatggccggggcggctttgcttggtataggggcgatgattgcaggatcttccgataaagatcattcgtcgcattctccgaacgatgatactgattctgatgcggacagtgattcggattctgactcagacagcgataccgaccctggcggcagcgaaagtgatgccgatgccgattctgatacagactcggacagcgactcggattctgacagcgactcggactccgacagcgactcggactctgactccgactccgattccgacagcgactccgactctgacagcgactctgactctgacagcgactcggactctgactccgactccgattccgacagcgactccgactccgactctgacagtgactccgattcggacagcgattcggattctgacagcgattcggactcggacagcgattccgactctgacagcgactcggattcggacagcgactccgactccgacagcgactctgactccgattcggacagcgattcggattccgacagtgattcggattccgacagtgattcggattccgacagtgattccgactccgacagtgattccgactccgacagcgactccgattcggacagcgactctgactcggacagcgattcggactctgacagcgattcggattccgacagcgattcggactctgacagcgactccgactccgacagcgactccgattcggacagtgactcggatgctgacagtgactccgattcggacagcgactctgactccgactcggattctgacagcgattcggatgctgacagtgactcagactccgacagtgattcggattctgacagcgactcggattctgactccgacagcgactcggactccgacagcgactccgactccgacagcgattcggactccgacagcgattcggattcggactccgattccgactccgactccgattccgacagcgactctgactccgacagtgattcggactctgacagcgattcggactccgacagcgactcggattcggacagcgactccgactccgactccgactctgactctgactccgactcggacagcgattcggattccgacagcgactcggactccgacagcgactccgactctgacagcgattcggattccgacagcgattccgactccgacagtgattccgactccgacagcgactccgattcggacagcgactctgactccgacagtgactcggattctgacagcgattccgactccgacagcgactcggattccgacagcgactcggactcggacagcgactccgattcggacagcgactctgactcggacagtgattccgactctgacagcgattcggactccgacagtgattcggattcggacagcgactccgattctgacagcgactccgattctgacagcgactccgactcggacagcgactcggactccgacagcgactcggactccgacagcgactctgactccgattcggacagcgattccgacagcgacagcgattcggattccgacagtgactccgattccgacagtgattcggactctgacagcgattcggattccgacagtgattcggatgctgacagcgactctgactccgacagcgattcggattctgacagcgactctgactctgacagcgattcggatgctgacagcgactctgactccgacagcgattcggattctgacagcgactctgactctgacagcgattcggattctgacagtgactcggactcggacagcgactcagactctgacagcgattcggattctgacagtgactcggactcggacagcgactcagactctgacagcgattcggattccgacagcgattcggactccgacagcgattccgattccgacagtgattcggactctgacagcgattcggattctgacagcgactccgattcggacagtgattccgactctgacagtgactcggattctgacagtgactcggactcggacagcgactcagactctgacagcgattcggattccgacagcgattcggactccgacagcgattccgattccgacagtgattcggactctgacagcgattcggattctgacagcgactccgattcggacagtgattccgactctgacagtgactcggattctgacagcgattctgactcggacagcgactctgactccgacagtgattcggactccgacagcgactctgactctgactccgattcggacagcgattccgatgctgacagcgattcggactccgacagtgattcggattctgacagcgattcggattccgacagtgactccgattctgacagcgactccgattctgacagcgactccgactcggacagcgactccgactccgacagcgactcggactccgacagcgattccgacagcgacagcgactccgattccgacagtgactcggattcggacagcgactccgattcggacagtgattccgactccgacagcgactcggattctgacagcgattcggattctgacagtgattccgattcggacagtgattcggatgctgacagcgactctgactccgacagcgattccgattctgacagcgactcagactcggacagcgactccgattctgacagtgattcggactctgacagcgactcggattctgacagcgattccgattcggacagtgactcggatgctgacagcgactccgattcggacagtgattccgactccgacagtgattcggattcggacagcgactccgactccgacagcgactcggactctgacagcgactccgattcggacagcgactctgactccgacagtgactcggattctgacagcgattccgactccgacagcgactcggattccgacagcgactcggactcggacagcgactccgattcggacagcgactctgactcggacagtgattccgactctgacagcgattcggactccgacagtgattcggattcggacagcgactccgattctgacagcgactccgattctgacagcgactccgactcggacagcgactcggactccgacagcgactcggactccgacagcgactctgactccgattcggacagcgattccgacagcgacagcgattcggattccgacagtgactccgattccgacagtgattcggactctgacagcgattcggattccgacagtgattcggatgctgacagcgactctgactccgacagcgattcggattctgacagcgactctgactctgacagcgattcggatgctgacagcgactctgactccgacagcgattcggattctgacagcgactctgactctgacagcgattcggattctgacagtgactcggactcggacagcgactcagactctgacagcgattcggattctgacagtgactcggactcggacagcgactcagactctgacagcgattcggattccgacagcgattcggactccgacagcgattccgattccgacagtgattcggactctgacagcgattcggattctgacagcgactccgattcggacagtgattccgactctgacagtgactcggattctgacagcgattctgactcggacagcgactctgactccgacagtgattcggactccgacagcgactctgactctgactccgattcggacagcgattccgatgctgacagcgattcggactccgacagtgattcggattctgacagcgattcggattccgacagtgactccgattctgacagcgactccgattctgacagcgactccgactcggacagcgactccgactccgacagcgattcggactccgacagcgattcggattcggactccgattccgactccgactccgattccgacagcgactctgactccgacagtgattcggactctgacagcgattcggactccgacagcgactcggattcggacagcgactccgactccgactccgactctgactctgactccgactcggacagcgattcggattccgacagcgactcggactccgacagcgactccgactctgacagcgattcggattccgacagcgattccgactccgacagtgattccgactccgacagcgactccgattcggacagcgactctgactccgacagtgactcggattctgacagcgattccgactccgacagcgactcggattccgacagcgactcggactcggacagcgactccgattcggacagcgactctgactcggacagtgattccgactctgacagcgattcggactccgacagtgattcggattcggacagcgactccgattctgacagcgactccgattctgacagcgactccgactcggacagcgactcggactccgacagcgactcggactccgacagcgactctgactccgattcggacagcgattccgacagcgacagcgattcggattccgacagtgactccgattccgacagtgattcggactctgacagcgattcggattccgacagtgattcggatgctgacagcgactctgactccgacagcgattcggattctgacagcgactctgactctgacagcgattcggatgctgacagcgactctgactccgacagcgattcggattctgacagcgactctgactctgacagcgattcggattctgacagtgactcggactcggacagcgactcagactctgacagcgattcggattctgacagtgactcggactcggacagcgactcagactctgacagcgattcggattccgacagcgattcggactccgacagcgattccgattccgacagtgattcggactctgacagcgattcggattctgacagcgactccgattcggacagtgattccgactctgacagtgactcggattctgacagcgattctgactcggacagcgactctgactccgacagtgattcggactccgacagcgactctgactctgactccgattcggacagcgattccgatgctgacagcgattcggactccgacagtgattcggattctgacagcgattcggattccgacagtgactccgattctgacagcgactccgattctgacagcgactccgactcggacagcgactccgactccgacagcgactcggactccgacagcgactctgactccgattcggacagcgattccgacagcgacagcgactccgattccgacagtgactcggattcggacagcgactccgattcggacagtgattccgactccgacagcgattcggattccgacagcgattcggactctgacagtgactcggattctgacagcgattccgactccgacagtgattcggattctgacagcgactcagactccgacagcgactcggactctgacagcgattcggactctgacagtgactccgattcggacagcgactctgactctgacagcgactcggactctgactccgattctgacagcgactccgactccgacagtgactccgattcggacagcgattccgacagcgacagtgactcggattccgacagtgattccgactccgacagcgattcggactctgacagtgactcggattcggacagcgactccgattcggacagtgattccgacagcgactcggactccgacagcgactcggattctgactccgactctgattccgacagcgactcagactccgacagcgactctgactctgacagcgactcggactctgactccgattctgacagcgactccgattccgacagtgactcggactctgacagtgactcggactctgacagtgactcggattctgacagcgattctgactcggacagcgactctgactccgacagtgattcggactccgacagcgactcggatgctgacagcgactccgactccgactccgactccgacagtgattcggattctgacagcgattcggactctgacagtgactcggattcggacagcgactctgactctgacagcgactccgattccgacagcgattcggactctgacagtgactcggattcggacagcgactccgattcggacagtgattccgacagcgactcggactccgacagcgactcggattctgactccgactctgattccgacagcgattcggactctgacagtgactccgattcggacagcgactcggactccgacagcgactcggactccgacagtgattcggattcggacagcgactccgactccgactcggattcggacagcgactccgattcggactccgacagcgattccgattccgacagcgactcggactccgacagcgacagtgattcggactcggacagcgactctgactcggacagcgactcggatgctgacagcgactccgactccgactccgactccgacagcgactctgactcggacagcgattcggactctgacagtgactccgattcggacagcgactctgactctgacagcgactccgattccgacagtgactcggattccgacagcgactcagactctgacagtgactcggattctgacagcgactcggattctgacagcgactcggattcggacagcgactctgactctgacagcgacagtgattcggatgctgacagcgactctgactccgacagcgattcggattctgacagcgattcggactccgacagcgactcggactctgacagcgactccgattcggacagcgactctgactcggacagtgattccgactctgacagcgattcggactcggacagtgactccgacagcgactctgactcggacagcgattcggactctgacagtgactccgattcggacagcgactcggattctgacagcgattcggattctgacagcgactcggattctgacagcgattctgactctgacagtgactccgattcggacagcgactctgactccgacagcgactcggactctgacagcgattccgactctgacagcgattcggattccgacagtgactcggattctgacagcgattcggactcggacagcgactcggactctgacagtgattccgactctgacagcgactcggattctgacagtgactcggattctgacagcgactcggatgctgacagcgattcggactctgacagtgactccgattcggacagcgactctgactccgacagcgactctgactctgacagtgattccgactctgacagcgattcggattccgacagcgactcggattctgacagcgattctgactctgacagtgactccgattcggataccgaaccgcaggcaaataatgatacccatacggcggctatcgataccgtagacggcaaccttaacaacgtgaccggaaccgcaagccagctgcttggcgtctccttactcaatacggtggatgtctccctgctggcggcgaactccacgaagttctcggttagtgaaggaacaactgaggatgtgacgatagctgtcactggttcaacgttgctgagtctgcagtcagtactggcactggtggggcaactggtgggcggcgcttcatccattaccgccgatctgtcgatagtgaataccgacaccggtgaggtggtgcagattattccggatgccgtgagcctgacgccgtctctggcgctgctcaatctggtttactccggcagcgcgaccttcagcgacctgccagcagggaactacgcggtggtggtttcttcaccgcaggcttccggcggtctggccgcagtggttgatgaactggcgtcagcaaatctgctgtcggttgccctggcgacaatcacggattctacgcagtacacctcgacggcaattgccggcaatgtgctggttgcggatgcagggggtgatgtagcagacaccggtgacggcattacggtaagcaaaatcgcctccagcgtgcagaccacgccgcttgatgtgacggctgcaggtgttgtgataaatggtctttacggtcagctgacgatccatgcggacggcagctatacctacaaggcgactggcgatgcggatgctgttggccaggccgatatctttacctacacgatagtggatgcggatggtgatacggcgacggctacgctgacgattaatatcgtggcaggaagtgatatcggtgagtcggatgctgatgcagattccgacagcgactccgattctgacagcgattcggattccgacagcgactccgattctgacagcgattcggattccgatagcgactctgactccgacagcgactcggattctgacagcgactcggactccgacagcgactcggattcggacagcgactcggactccgacagcgactcggactccgacagcgactcggactccgatagcgactcggattccgacagcgattcggactccgacagcgactcggattctgacagcgattcggactccgacagcgactcggattctgacagcgactcggattccgacagcgattcggactcggacagcgactccgactcggacagcgattctgactccgacagtgactccgattcggacagcgactcggattcggacagtgattcggattccgttgaggcaatacctgataccaatagttctgaggttgtgcagcagtacggcaatcttaatggtactgaaggtaatctctcgcaactggttggcgtctcgctgctgagcacgattaatgtgtcgctgttgtctggcagtagcttccgcttcaacgtggacaacaacacaacagaggatatgacggttgatgtcagcggcgtgtctctgctttcaacggctgggctgttaacgtcgatagtcaatctgctgggggctggaaatacgctgacagccgatctgtcggtgattgatatcgcgactggacgcgtagttgctatcgacgcgggaagcgtgagtattagcgcaacgttgcttggtgggttggtctatagcggaacagcttcctttgagaatctgcctgctggtagctatgcgctggcgatatcctcaccaaattccgatggagttctggtgagcctgatcaacacgctcgcaggtgcaggagtagccacctttgtagaagcaacggtaaccgattcgctcggttatagcggaagtaccgttacaggcaatgtgctggagggatcggataacggcgatatggccgatagcggtaccgaccttacggtaacgtcggtaacggccaccactgctgcaggtgagactttctcagtgaatggcggcaccatatcggtaacgggtgcttacggcgtactgactattaacgctgacggcagctatagctaccaggcatcaggaaaggccggatcggcaggtaatgcggatgtatttacctacaccattacggatggtaatgggctgcaatcaaccaccaccctgactatcaatatcggtcaggaggtcgagaccgcccaggctaatccggatacgcaggcttattacgtcggcaacgtcgaagataatcttgatatccaggggggcaatgtcgttcaggtggcgggcctgtcgctactgaataccgtgaatgtcgcgcttccgaccaatggctttaagtttgtcgtggctgaagggactgaacaggatgtgacgttaggcgtttcggggtccactgcccttagcatcgcgctaggcgccgttaccctggatctcattctgatcaataccgacactaaccagatagtcggcgttattaaggatggaattacagcaacgccgacaggtttccttggattaagccttgaatacgcgggaggaggggaatttgaaagaattggcgccggtaactatatggttgttatttcgtcgccgactactgaaggattgattggttcgatactgaatctgaatttgggcaccagcattagtatggaggtgacagattcgactaaatacgtgacggggaatgttctgcacaccgatagcgatggcgatgttggcgatacaggtaatgaaattaccgtaagcagcattcagtttggatcgcagatcgaaacagtcactgccggcggcgtcacgattaacggtacatacggtactctgataatcaagtctgacggtagttatagttaccatgctaatggaacaacaggggtgggtcagagtgatgtcttcacctacacgataacggatgggctgggtcatacatcgtcgactacgctgacgatgaacattgagtcaacgccaccggtagcggttgatgatatcgcctccctgtcggcggcaacggcaatgcagtcggtaacctggacgcaaagcgtcagcaatcttgcagtgccaaacacggcagtagcggctaatgcgacatcggcggcgaaagtcaccagtcagaactttaccatcgctgaaggccgggaggtggatggagcatctatcactctcaacttgagtggtaaccgaaccagtggtctctcactactgaatggcgatctttctgggacggtctctcttatccatcatgtcactgttgatggtgtcacaacagatgtaacggtgtggacgagttctctgacgatggctctggatggttctctccttagcccgtcatccgatacagatactgtgacgctgaacatggttaacggcggcattccgctacaactggcggcaggtgattatactctgagtattagtcatacgatgcatgctggcacggcgttgtcctacaacctgtcagcgagcgtagcaggaacagagatccttaccgatgcgcatctgacggtcgggcaatctgtggtagggaatattctcgacggttccgatgcgaatggaacaccagacacgcttggttcgctgcatagcggctttacgataagtggcgaaaacaatctgggtatcgcgaccaactggaccttccattctgatggcacagtaactaacgatacgggaaccagcgcatctaatggaaatgcggtgctgtatggtgaatacgggatcctgaccattaatgggcaaggtggttacacctatcagttgaacgggggtgtgaataccgatgcaataacgtctaaggagacatttacttatacccttatcagtagtgatggcggcagttcgacggcgaatctgacgatcgatctgcacccgcagatcgccggcagcgtcaatgacgatagcgttcatagtaccgcttacgatgacaccttcagcatgggtgtgggagccgatacgctggtttacaacctgctggcggatgacaacaccggaggcaacggtagcgatatctggagcgatttctcggtcgcccagggagatcatatcgatgtttcggcgctgttggtcggctggaatggttccagcgatacgttgggtaactatattactctgagttatgtcggcggaaacaccgtggtgtctattgatcgcgatggaacgggtggaaacacccatcaacctgcgacgttgattacgctacagggggtccatatcaattcgctcgatgagctaattgataccaataactcgaactaaataagtcgatgagaatggcggcacagggaggtgctgccgttacgattttttgtcgcgaaagggataaggaaaaaccaatcggggaacgacgggctatcgttaaataaaaagaatgatgcggaaagagtatatccatattttcagtttgctttctgaagggtaattttatgcgtctatttcaaaaaaaagggatggtcagcgtttacagctgcagcactattttcctgtcaatctgcgtggtattaacggttgacgcagaggagctttcttttccgcccaccagcatcagcacccagaggttaaacgatactcagcaggtcgccggttatagcgaagagcttatcaaccctgaaagtcatcttgccggtccactggatatagctaccgcagtaaaatcagcagtcaattggcatcctgctatcaatcaacaggtgagtaaacttcaggagcaggtgcaaaaagtggatgtagcgaaagccaaatattatccgcaggttaatgcgggtatgaataatgggtacagtaacacctactctgattctggatattccccctcattagttgtctctgtttcgcaaatgctgtacgactttggcaaagtctccagttcggtgagagcggcggacgctgccgttgcccaacagcaggcgatggtcatgcttaatatcgatcaggtggctcatgataccgcgggtgcagtggtacagctgcaaggttatcaaaagctcgtgaaaatagcccaggcccaggtcgattcgttaaagcatattggcgatcttattcgccagcgcaacgacgccggggcgacatcgctttctgatgttgtgcagacggatacccgcgttgagggtgcgcaggcgacgcttatccagtatcaggcagcgcttgagcgctggaaggcaacgctggcgacgtatcttggtctcggaagtattacctccgtaaccgaaagcgtaccgcaggctatggatgccgcctgcgccgttagtaaaatcgattatcgaaccgtaccagcggtgctcgccgctttggcccaagctacacaggcacaagcccaggtagataatgccaccgcgcaaatgttgcctacaatctcgctggaacctcaggtaacgcattacctcaatgataattacgccaacagcgcggtattaaataaaacgcagtattcggcatgggtcaaagtagaaatgccgatctaccagggcggcgcgctaacggcttcccgcgaagcggcgcagcaaacgctatctgcggcgaatgccgggatcagaaacgcgcaactcgatgccagccagaagttgagcgcctcccgcgacgaggcggtaaacctgaaacaatctatcgccatccagcgccgccagcaattgcttggcgaacaaacccgcgccctgtatcaggatcaatatttacagctcggcacgcgtccgttactcgacctgcttaacgtcgatcaggaaatttatcaggcgcaatttaatcaggtattaactgaagcgcaactgcgaaatctggaactggactgtctgttcagtacagggaaaatgcgcgccgtttttgctctggataaccaaagaattcagggcgtggagattcgaccatgagcgaacaaccccagcgcagcgatattccgcatttacaggattgggctaacgctatggcttttgtcgccagccattatcggcaaagttactcaccggggacgcttcatgccgcggcggagtgggcgacgcaaaaaacgctgcctgatgcgcttaaacatttatgccgtcatgccggattgcattgccaatttcttaatggcaatgaccggaaaatgtcggcctggcggctgccgcttgtggtacagctcaaagatggccagattggcattattgaaagcttcgatctacataactcagtcgggatccgttttgtcaaagagcttacattactaagccactgtccgcttgactccttgttagatgaaattgaattcactgtggcttttcgtccggcctcgccggagaaagatattagaactgtaagctacctcacacgcttccagccggattggttacgtaagatcgttttaaaagattggcgtccctatacacatgtcatgctggcgtcgctggcgatcaatattttggcattagccggtatcctcttttccatgcaggtatatgatcgggtaattccggcccaatcctatcccacgttatatgtcttgtttagcggcgtattaattgccgcagtgttcaatttcgttctgaaaattactcgcggtcacgtgaccgacctgctgggaaaacgtggggatattcgtatctccgatcgcgtatttggtcacgcattacggctgaaaaataccgcggtgccgcgctcgacgggcagctttatttcccagattcgcgagctagagcaggtacgggaaatgatgacctcgaccatgatgacggtcattgccgatttaccttttttcctgctttttcagcttgtgctatttatcgtctcgccatggctgagttggatcgcgcctgttgcgactatcctgatgctgttaccgggattgttactgcagaaaaaactggctgagctggcaaataaaaatcagcatgaaagcacgctacgcaacgccattttggtggaaagcattcagggcctgccggatataaaaatgatgcaggcagaaagtcgctttctgcaacaatggaacagctatgtggcgattactgcggaatcgggagttcaaacccgaaaagtcactcatgggctggtgagctggggcatgtcgatccagaacctgttgtatgccaccgtagtggccgttggggcgccgctggtgattaatggcgacatcacgaccggcgccatggtggcggcatcgatgctgtccagtcgaatggttgctccgatgacggcgctctgcggggtactggctcgctggcagcaggtgaaagtagcgaaagcaagcctggataatttaatggcgctgccggtagaaggggggctggatgagccgcggatcaatcgagcggttctgcacggtaattatgaatttcgcaacgccgagtttcgttacggcaaagacaatggccccgcaccgctgcgaattaaacagctttctatcaaagccggggaaaaaatagctgttctggggcgcattggcgccgggaaatcaacgcttttgcaggcaatgatgggtaatgttgagttgacgtcaggcgaactaaggcttgacgatctttcgctgccgcaaatcgatctggcggatattcgccgtaatgccacgctactgacgcaggaggctcggttatttcatgggacattaagggaaaatgtgaccctgggacggcctatggcgagcgatgatgaactggtgaaagtgctggagctgtgcggtgcgctggagtttgtcaacaaactgcctatggggcttgaacatctggtgatggagggagggcttgggctttccggcgggcagcggcagtcactgctgctggctcgagcgctcatccgcgatcccaatattattctgctggatgaacccacctcattctttgatgaacgaacagaaaaagcgtttgtcgagcagctggcccgttgggcaggagagcgtacgttaatcatcgccactcacaaagcggcggtgctcaatatcgtcgatcgtatactggttattcaggacgggcagctggcgctggataagcctaaagcgacggtatttgagcaagaaaaagcgcgtgctcaggtggtgaacatatgaataagcccactgctgcgattttcccgttggtaaaggaactcgatccggttgctgcgatggctgataacgagcgtgatgaggccgagctggttaaatcgcgccgcctaatcgctttactggcgctactgctggtggtcacaggcgtttgggcgtggtttgccacgcttgatgaagtatccaccgggaccggaaaagtgatccccagctcgcgcgaacaggtgttgcaaacgctcgatggcgggatcttaactgagctgaacgttcgcgaaggcagccgtgtcgccgcgggccaggtggtcgcacgattggatccgacccgcagtgaatccaatgttggcgaaagtcaggcaaaatatcgcgcgtcattagccgcaagcattcgcctgaccgccgaggtgaacaaccaaccgctgatttttccaccatcgctgaaggcctggccggggctactggcggaagaaactcgcctctatcacagtcgcagggagcagctaacgaagtctatgcggcaactggagcagtcgttatcgctggtcaatagtgagctggcgataaatgaaaagctggctaagaccggtgcggccagtaatgttgaagtgcttcgtttacgccagcaggctgccgatattgagctaaagaaaattgacctcaacactcgctactatgttgatgcccgcgagcagttgtcaaaagccaatgcggatgtcgccagccttgccgaagtgattaagggccgggcagattcagtggctcgattgaccgtgcgctcaccggtgcaggggatcgtcaaaaatatcaaagtgaataccatcggcggggttatcgcgcctaacggtgaactgatggatatcgtccccattgatggtcgattgttgatcgaagcgcggatttctccgcgcgatattgcatttattcatcccgatcagaaggcgctggtgaaaattaccgcctatgattatgccatctatggcgccctcaatggtgttgtcgaaacgatatctcccgacacgattcaggacgaggcaaaacctgatgtttactattatcgggtgtttatccgtaccgatcataactatctggaaaataaacgcggtaagcgttttttaataggtccagggatgatcgctacggttgatattaaaaccggagagaagacagttatggattatttggtgaaaccatttaatagggcaaaagaagcgctgagagaaaggtaacacctgctagttagctttatgtttggtgaattttcaacgaatggagatttgagatggcattgagcgatttattacaacaggcttgctttcagtgcaaaccattaaaaacgaccgcattgcctgctgattatcctgggtgggtcatcttttttagcgtcagtgacggtaagcagcgtgcgcatgtccatgtttcgacagcagccagctttgatcaagcctggctagccggggccagagcgctgcaggagtggcgtaaaaagcaagataatgaaacccaatggttacgaattgatattgtcgatagcgtagaacagctaacgtgggaaactctattaaagaaactcaatatcaccaaacgcaattattttcgcttcggtatctcttttgatacacaatttacgcaagcgatccttgaacaggaaattgcggcgaatgctttactttatgatggggacaatggcgtagcggcgccaaatgacatcaatctggaaaattatggtcaacgccgatttaagcgcagtttgaactggccgagcgaacctcagcagatactatggcggtttaaaacgcgttcagtattctgcgatcgtaacggcgctaaactcatcgaacatactggccgcagttccggctaccgcgttatcggtgatgaatggcaaaaaaattatctgcccgaggttattaaaaaggggagcgattatctggctcgtcaggtcaaaaaagacggactctattattacggatggtttccctgctttgaccgtcctgtgcgatcctataatgctttacgccatgccagctcaacctattcgctgattgaggggtgggaggcgactaagcagccgcaccttcgtcaggcgatcgatcgggcgattgcttacctggtcaataaccttatttctgttcgtacgcttgctgatggacgacaggctgcgtttctttgtgatgtcgaaaatgaaattaaacttggcggtaatgccgtcagtattctggcgctggtgaaatacaccgaaacgacgggcgatcgacaatatctggacttgttgtcgcaactggccactggaattgcatttatgcaggacgcgcaaagcggtgagtttgttcatgtccttaacagccacgacctctcattgaaagccaaacatcgcatcatctattacgacggtgaggcggcttttgccttaatgcgcttgtatagcttgacgttggcgccgcagtggctggttatggtggagaaagcatttgaatacttcattcgacaaaaacactggcagcatcacgatcactggttgagctattgcgttaacgaattaacgcgttttcgcccggaggagcgttatttccgcttcgggctggacaacgtgcgcgatcatctggatttcgtgctgcaacgggtaacaacctatccaacgctactggagttaatgatggcggcggcggaaatgattgcgcgcctggaggcctctaccacacagcgccatttgctcgacgactttgataaagacaaattttaccaggcgctggaggcgcgggcgcgttatttactggatggtttcttctggccagagctggcgatgttttttaaaaatcctgcgcgtatcgttaatagtttctttattcgtcaccatagctatcgtgttcgaattgatgatgtagagcactatctgtcaggttatatcgcttatcagaagtattttcaggcagccagcaaacgtcagcaatcgccaatcgcggcgccgcccgcgcctcggggaacgaccctttttttgttagagaatctgcgcgacgtggggaatggtattgaggttgcggctacccggcgagcaaggctgtttgttgaacatttacacaccgtcccgtggcttatcaccgccgtctggaacccagaccttaacgatgcggtaaaagcgttgaaggcgcggggagcgttgccggaagcggtgccggtttataacctctacaatgcattagcgtcgtgcctgagtgcggggaagatcgtcccgcttcccgggctgaaaggggaggttgagcttcgtcagacagttgtgccgaaagcagaggcgccaatcggtaaaaataattatcaattacgcccgcaggggcaattggtggaagattacgtcgatagcgcaggaaacgtgttgctgcgtaaatattttgatatcaagaaagcgaatctgcagattatccgcatggatgtcgctttgccgggcggggaggtcaaatcctttaaccaacaggaagcgtttttctcctggatgctggaaatgatgctgcccgcagcgggcaactggcattttatcgtcgataaaaacaaagcgtggaaagattttgtctgttcgcaaccggcacagcggatgaactgcacggttagcgcggtcatccactctcatcatcaattgctaaacggcgggataaaagcttcttaccgtcatttactggaacaaccgcaactggtggatcggttaatcgtactcaccgacgaacaatggcaagatttacagcaagaggggatccccggcgctcgccttgtggtcattcccaaccatatggatgacagcaaaattccggttaacccgcaaaaggagccctcagaaacggtcatttacctggcgcgttattcagaagaaaagcagcatctgacgctgttcaacgcattccgtaaagtgtccgcacaacgtcccgatgcgcggctccatacttatggcgtcggcccgcttcgccgtaaacttagcgaccaggttaaggcgtggggattagaagacgtgataaaaatcaacggatttacctcggatattgctgccgttcatcgacacgcttgctgtacggtcctctgttcaaatcaggaggggcaatctctgtcggcggtcgaggccatggtctacggcacgccgttgattagttttgctattaaatatgggccgcgcgatattctgcaggaccgccaggccgggattctggtgccttacggcgacgaagaggcgttggccgcggccttagttcgggttatttccgataaggcgctacaaaaagagatgcaggccgccgctatgcgcaatgcgcgccgttattacgctaccgcgatagccggacgctgggaaagctggttacagcacaatgagcagcgaatgaaggagcaggaggagaagccactcaatgtggcttcgctcaaacaacgtgtcgtgtaagaacgtttctgccccggtaaaactcttttaccggggcgggttacatccaaagaggcggtaccttgcgatatagcagagcaggagcggtatggtgcgcaatttatctgtcagcggtgttttgtttgccgtccacggcggccgatgaaatggtgcaggaatcccgctgcgtcaaaggttctatattacttaatcatcgtctcgaaaaagaatatgttgaagatgatttccatattttttatagcctgcaaggacgagacgccctcagatatcagtacgacagctcaggtagtggcgtccctgacagtatcaaagatattgccgggcaactacaggccgctaaatacctctattccagtgtgcttggccttcgctttccgttacagcaaaagatctatgctcaggccaggcaaatcaatgtctatgtgctgcaactgccgaaaggaaatggtttggccttcgatcgcgtggcggcagaaacgatgagtgacggcaggcagctgccttgcggtttaaagtttgtattgaatgccgcgctggaaccggcgcgtaacattacgccagctcatgaatttttccatctttatcagtatggctatgccgtttttaaacaaaaatggtatctggagggaatggcgcgatggatggagaacagctttaaagcgcctgagaaaaatacccggcggctctctccgcttcctcattgcgacagtaattttacccggggttataacgccgcgaattactgggcgagctttgcgcaagcacattttgctgatgtcgctatccccgccgcagcacagcgttttcgttacagcgacggttcgccagttttaatagcgcaggaagtaaaagggggagcaatgctagcgccgttttttaatcagttggcgcagggcagcgcggcacagtcgcggcagttaaatcaggcgaacatccgctggtctgaagctcagcagcgcagtccgcaatttaatgaggcgatctgtcaggcgttggccgccgcggtggcagagaaaaaatagaatataaaacgaaacgccgcccatcagggcggcgtgggtaggctagttacgcaaccttggcgcctgcagctgctgacgaatcgttttggccagttcgtcaagggacggctgttccgggtgttcgtcgcgggtttcgctgctcagctgcgcttctgccagataggtgtggatcggctggccatcatcatcttccatcaccacatggtaccagggcgccgcacgcagttcgtcattggcggcaatctcatcctcttccggttccgcgagtgaatactcgggatcgacatcgacgatgacacccaggtagcccaagagcgtatggcggacctgttggccgataccgaatttgctggctatcataggcacctcctgggaaacatgaatactccctatatgaggctcatgtttcgtttttcaagttacatgacgcgacaggcaaaccccttcagatacagcccttccgggtaggttgcgatcaccgggtggtcggcagcctgacggaactgttctataaattgtacatcacgcccggcatcaattgcggcatcggcgatgattttctgaaataaatcggtggtcatcagcccggagcaggagaatgtcagcagcacgccgccggggttcagcagctggatcgccagcatattgatatctttatagccgcggcaggcgcccatcagctggcttttattttccacgaacttcggcggatccatcacgatcacgtcgaatttctctccctgatcgcggtatttacgcagcagtttgaatacgtcgtcgcgcacaaactccgctttggacagatccagtccgttgatctccacgttctggcgggcaacgtcgagcgcctcctgcgaggtatccacgctggtgacctggcggcagccgcccatcagcgccgacaccgcaaagccgccggtgtaggagaagcagttcagcacccgtttatccgcgacatagcggcgggtggccagacggctgtcgcgctggtcgaggtagtagccggtcttgtgcccgccctggatatcgactaacagcttcatgccgtgctcggtgatcggcagcagcgccgggggcagttcgcccaccaccggcccctgggccagctccagtccctcttttttacgcacggcgacatcgctgcgatcgtaaatggcgcagtccgggaacaggttctgcagggcgctgatgatggcggcgcgctggtattcggcgcctgcgctgagcagctgcagcacgaaaaagttgccaaagcggtcgatagtgacgcccggcaggccatcggactcgccggcgatcaggcggtagctgtcgaggccatcgcgctcggccagccaggcacgccaggtttgcgcctgctgcagacggcgttcaaagaaggcgctatcgatggcttcattgcggtcgaaggtccacacgcgggcgcggatctgcgacgacggcgagtaagcgccgcgggccagccattttccctgatggtcaacgatatcgatggtttcaccgctgcgggctttaccttccatgcgggcgacgccgccggagaatatccacggatggcgacgcagcagggatttctcgcgtcctttggctaacactaagcgggggaatagggaatctgtcatggggctacctttaagcaacgggaatgtcggcaccgaaaaatggcgcgtagattagcacacctggcgcacgcaagcatctttcgcccggctggcacaggtgagcgtttcggcacaaaatgcaggcgcttcggcacattcagctggtgcggactctcataccctgttttctcaccccaacgaggagcagacgatgaaaacaggtatccgcatggctgtggcgatggtagcggctgtgagcagcggcgcgatggccgcgccgtttagcgtaagcagcaatgatatgcgtgacgggcagccgctggcccagcagcactggtttgccggtttcggctgtaccggaggcaatgtctctccgcagctggcatggaaaaacgccccggcgggcacgcgcagcttcgcggtcaccgtccgggatcccgatgcgcctaccggcagcggctggtggcactggacggtggtcaatatcgccagcagcgtcttttcgctgcccgctggcgcgggagataaaaacagcgctacactgccgggcggagcggtccagggccgcaacgattttggctatgccggcttcggcggcgcctgtccgccggcgggagataaaccgcaccgctatcgctttacggtatgggcgctggatgtccccacgctgccggtggatgccggggccagcggggcgctggtcggctatctgttacatagccatgctctcgccagcgcacagttgacggcgatggccgggcgttaaaataaaaggtcggtctgatggagagtatccactttcagcataacgccttaaccgcggcggagatcaccacccgacggctatgcagactgcatcgcgtgcggctgttctccccggcgctctgtcgggtgaaacgcggcagcaaagtgattgtgcaaggggagagccgggtgctggcgactccgcaacagctgattgttttgccagctgatgtggaactggaggtgattaaccagccggagaacggcctcttttgctccgatctgctgtcgctgacgcccgagctgctgacgaggtttaagactcgttatctcagcgaaccaccgccagggcgcctgacctcgctctgcgcaccggtgacgacagagctggcgtttatgtggcaaagcgttctgcaggcggtgcgggagggattgtccgtcgcgctgcagcagcaccagaccatggggctgctgctggccctgtatgaggctggctatgcgggcccgctgctcgtcgagcggcagcaggatctgtcggcgcaggtgcggcagctgattatgctgtcgccggcgcaggcatggagcgtgtcgcgggtggcgaaaatgctctttctcggcgagtccacgctgcgccgtcggctgcagcaggaatcgcagagttttcgccagatcgtcgaggaggtgcggatggcccacgccctgggccagctgcagaccacctcgcggccaataggcgaaattgcgcagaacagcggatatcagtcgggatcgcgctttaccgcgcgcttccgtcagcattacggtttactgccgaagcatgtacgctgaacgaatttgctatcctcagcgtatagcgtgagcgaaaaggagatgattatggccagtatctgcacaatggcatgggtttacggttcggttcagggcgtggggtttcgctattcgacgcagcgggaagcgctgcagctgggggtgaccggttatgcccgtaatctggatgacggcggggtggaagtgcttgtctgcggcgaggcggagcaggtggaaaaactcatcgcctggcttaaagccggggggccgcgcagcgcgcgggttgaccgagtgttaaccgaaccccatcaacccacccgcagctgggacaaattcgcgatcctctattagatgcacttcaccggcttcggcaagccggcgattttagtcgcctgtttggcgggtcctttcgggaacaggcgatagagatagcggctgttgcctttctcttcgccaaacttgttggccatcgccttgaccagcatacggatcgccggagaggtgttaaattcaaggtaaaactcgcgcacaaagcgcactacttcccagtgttcaacggcgagcgttatcccttcctgcgcggcaatgacttccgccatcgcctcgctccactgggtggtatctttcagatagccttcgctatccgtttcaatttcgttgccttcaaaaataaacatgatttttcacataccgcctgaaactggccgcagtgtagcaaaaaaaaaggccccgcataagcgaggcctctgttaagcaggggagcggttagtcccggctggcgaagcccaggatgctcagcaggctgacaaagatgttgtacagcgagacatacagactgaccgtcgcgcggatatagttggtttcaccgccgcggataatgttgctggtctcgaacaggatggcgcccgaagagatcaggatgaacaccgcgctaatcgccaggtgcagcgccggcagctgcaggaacaggttagcgaccataccaatcaggacgaccaccacgccggccatcagcatcccgccaaggaatgacatgtctttacgcgtcgtcagcacataggccgagcagcagaagaagaccagcgccgtgccgcccagcgccaggccgattaaatcgcccatgccggcagaaagatacgcgttcagcatcggcccaaggatatagccgaggaacccggtgaaggcgaaggcggaaataatcccggtgggtttattcgccgttttgtaggtcaggaacatcagaccgtacatccccacgagggtcaaaatgagacccggcgaagggagcatcagcactgtgctggcggtggcggtgatagcggaaaacgccagcgtcaggctgagcaggaagtaggtgttacgcagaaccttgtgcgtgctgagcagcgaggaacggtcacgcgatgatgtaattatgcgatccatgagtcactctcttatgacagatgtaattagggataaagaataagaaaaacaagcgtgaagccctaatgcttttacccatctttacttagtttttaccgcttttgcctggcataaaattctatatagatagggaaaagcgatatattttcgcttttcgcgtcgctgagccgatcgaaatcttataggtcactgaaaaatattgccttattgcagttctgcgactaagtgtggaagagggggattaccccgtacgtcaaaggcaaagggaaatgacattacacaaaaaaaatcacatcacccgaacactcctggctgtcagtatgctggctatgagcggcggggcgctggcggcgcaggtgccgccgggcacccagctggcggaaaagcaggagctggtcagaaataacggcagtgaaccggcgtcactcgatccgcataaagtcgagagcgatgttgaattcaatatcattagcgatctctttgaagggctggttaacgtgtcgccagcgggagcgatccagccgcgactggcggaacgctgggaaaacaaagacaacctgttatggacctttcatttacgccccggtctgacctggtccgacggcacggccattacagcgcaggatatcgtctggagctggcaacgactggtctcgccggcaacagcctccccctacgcgagctaccctggcaatatgcatatcgccaacgcccgcgagattgccctcgggcaaaagggacccgagacgttgggggtgaaagcgctgaacgacaccacgctgcaggtcactctgacccagccgaatgccgccttcctggcgatgctggcgcacccttcgctggtaccgatcgacaaagtgctggtggagcggtatgccgataaatggacccgaccagagcatatcgtcaccagcggcccgtataagctgtcccaatgggtggtgaatgagcggctggtggctgaacgtaatgcaaagtactgggataatgcgcataccgttattaataaagtgacttacctgccaatctcttcggaggccgccgatgtcaaccgctacaaagcaggggagattgatattgtctatacggtgccgatcaatcagtttgcgcagttgcagaaaaccatgggcgaccagctggacgtttcgccgcagctggcgacctattactacgaattcaatactacccggccgccgtttaacgacgcccgtgtgcgtcgcgcgctgaatatggcgcttgataaagatatcattgccggaaaagtgcttggccagggccagcgcccggcctggctgatcggtcagccggatatcggcggcgtgacgctgcataacccggactacgccagctggccgcgtgagaaacggattgccgaggcgaaaaaactgctggcgcaggcggggtatgatgaaagccatccgctggtctttaccctgctctataacacctctgagtcgcaccagcgtatcgccattgccgccagctctatgtggaagaaaaacctcggcgtcgaggcgaagctacagaaccaagagtggaagacgatgctggataccatgcatacgcataacttcgacgccgtccgctacgcgtggattgccgactacgacgatgccgccaccttcctcaatactttccgtaccggggatagcgagaacaccagtcagtacagcaaccctgcttacgatgaggccctgcgcaatgcggcgaaagcctccgacgtggcgacccggggcaaatactatcagcaggcggaagatctgctggcgcaggatgttcccgccattccggtctatcactatgtacgtacccatctggtgaaaccttgggtagggggcttcacgccggataagctggggtattactacaccaaagacatgtacattaaaaaacacccatccgccagcggcgatgggcgttgattttctgtgcaaactgcctgaaattcagacgaataacacaaaattgtttgtttttaaggcagttgatcaaaatgatgctttacagcatccgccgaggtgtttatagtgcgcctcacaccggaagtgtggccgagcggttgaaggcaccggtcttgaaaaccggcgacccgaaagggttccagagttcgaatctctgcgcttccgccatataaaagaaggggttaccgaaaggtaaccccttcttgctttgtccggtcggtcgtgcatgacccggacagcgaccgacgacgttttcattcccacagcgctgacggatacatagcccgtcgcatggcaggacttttcacaacgcccgcttattcttcgacaatccgcgccttcggtttgctcagcaggagcatgaccagcgcgacgtagggcatcggctttcagaaatagtagccctgcagcagatgaatattctggcgattaagataatcccgttgggcctcggtttcgacgccctcggcaatgatgcgcagtgacagcgtccgcgccatctctatcacgcagtccagcagcttgcttgtcggcgcctccccggttacccggccgacaaaactctgatcgattttgatatagtcgaaaaccagctcgtggcgacaggaaagcccggaatagccggtgccaaagttgtccagcgcgatggaaaacccgcgggagtgtaacgtattgagcttgtccacaactgccccgttgagcaacagcggctcctgctccgtgatctccagcatcagcttcaccgctttaccctcaaagccgcgctgatagtgcaggcagtcatcgataaacgtcggcgcgttaatatgtgacacgctgatattcaggccaatatgaaacccatccggtagtttactaaagagtggtctcatctgcgcgttgacctgcgccatcaggctgcgggtcaggggaataattaagccggtacgttcggccagcggaataaattccgtgggcgagcgcgatggcgtcgtgctgttttgccagcgggcgagaatttccacgccgtatatctccccggttttcccgttcaccagcggctgatagtagggaacgatataaccctgggtgatggcgtagcgcaacttttcctcttcagaggtgtaaacattaagatatttacgcatcaggaaataaaacagcagcgaaaccgagaaaataaagatcaacaggccggagccattattcaccaggcgggcgagactaaacaaaagcgactcgggataggcaatacgaaacgaataggcgggcgaggtaaatacctcctggtgtgggtccgcagccagcggcttaacatcgccatatctggcaatcatttggttctgcacccagagtgccagcccgttgttatcggtatcgctatatagcgcatcgcgcagatggatgtcgctgatcgtgacaatcaccctgatcggcgctaagcgcgtctgatagatcagcaccggccgcttattgaccatcattctggccgggagcagtaacagagggtcatcaggcaaagactcagggctaagtgtcaggacccggttgccagttaatgacgaacacgcccgcaagaaataccatcagcgccagggaaaaggcaatcactcgcagccggtggatgaagagacggcgttgtttcttggcgatcgcaccgtcagccagccggcgtggcagcccggcgcgatggtgcgactgacggtcagcggcaaggcgcgggtatttagcggctaatccctgagcaggcggcgccggctatcgccggtgccgcacagaaagctaatcaggcggaggatgaagccgatagtatccgcgccactgacctcgtcgccatggagtggtagtacgttggaacaattccgcggggtcagtccatctcaccgccgttttgccggtgtgcgctttacaaatccagcactaaccggccgcctttagcgcgcgagcagcagatcagcatactctgctggctggctttctcttcctcgctgtaatactgatcgcggtggtcggcttccccctccagaatcatcgtttcgcaggtgccgcacaccccttctcggcacaggcattcgaccttcgccgctttgttattctcgatcacctgcaaaatggtcatatcctgcggcacggtaaattcgcgtccggaacgcgccagcaccagggtaaatgcctctccgcttttatcctcaaggataaactgctcaaagtgcagctggctggcgggcacctgatggcgttcggcggcggctttcaccgcctcgttaagcgccgctgggccgcaggtatacacgtgggttcctggctcgaggtcggcgaacaggcgcggtaggtcgagacggctgccgagcgctgatacatgaacattgacccgatcgcgccatggcgcagcgctgagcgcatcgacgaaagcattactgtcggcgtcgtgaaaacagtaatgcagctgccagtcggccttccgctgttccagttccggaatatgcgataagaatggcgtaatgccgatgccgccggcgatcagcagatgttttcgcgcctgtggttcgatggcgaacagattgttgggcgtggacaccgtcagggtatcgcccgggcgcacccgctggtgcataaaacgcgagccgcctttggaaggcgactcaagacgcaccgcaatctgccagctggaggtatccagcggcgagctcatcagcgaataggcgttactgtagcgctgctcgccatcctgcatctggacgataatatggctgccgccgctgaatgccggcagcggggcgccggtcggcgacaccagcgtaaaacgcttcacaagaggggtgatctgttcaacatcgcgaacgaccgcctcaaacatttgataatcagacatcgctgaactccattaaaaaatcccggcgtggctagcgccatcgccgggagagcagatttacaacccctggcagagatacttcatctccaggtaatcttcgattccgtgttccgacccttcgcggccaagaccggactgctttaccccgccaaacggtgcgacttcgttggaaattagcccggtattgataccgaccatgccgtattccagctgctcggagacgcgccagatacgggcggcatcgttactgtaaaaataggaggcgaggccgtagatggtgttattcgcctgctcgatgacctgctgctcatcgtcaaatttcaccaaagcggccaccgggccgaagatctcttcctgcagcagcaatgaccccggctgtacgtcgccgatcaccgtaggggtgaagaaattaccgcccagcggatgcgctttaccgccagttaacagcgtggcgccgcggctcagggcgtcgtcgagcagggactgcactttgcgcccggcgtcggcgttgatcagcgggccaatctggacatcggactcgctgccatcgcccactttcagggcggcgacgcgagcgacgaatttatcgcagaattggtcgtagatggcgcgatgaatatagaagcggttgacgcagacgcaggtttgcccggcgttacggaacttggcgatcagcgcgccctcgaccgctttatcgatatcggcgtcgtcaaagacgataaacggcgcgttaccgccgagctctaaagagagctttttgatggattccgcgcactggcgcatcagcacgcggccaacttcggtcgaaccggtaaaggagagcttacgcacccgctcatcgccggtgaacaccgcgccaatctctcgcgactggccggtaacgacgttaatgacgccctgcgggatcccggcctgattcgccagctcagccatcgccagcgcggtaaacggcgtttcgttagccggcttaatcaccatcgtacaacccgcggccagcgccgggccggccttccgggtgatcatcgccgccgggaagttccacggggtgatcgccgcgcagacgcctaccccctggcggatcaccatcaggcgtttatcggcgccgggggaggggattatctcgccgttggcgcgtttcccttgttcggcaaaccactcgataaacgaggcggcataggcgatttcgccttccgcttccgccagcggcttgccctgctcggcggtcattatctgcgccagcgcggttttgttttcgaggatcaggcggtgccagtttttcaatagcgcggcgcgctgagcggcggttaatgcgcgccagttcggcagcgcggccgcggcggcatccactgcctgttgcgcttccgcacgccccatattggggatctggccgagcgtcgcgccggtggaaggattgctgacggcaagcgtcgtgccgtcggcggcgtcgcgccagcttccggcaatcagcgcctgctggcgaaacagatctgagtgaaacacagacatagcaagctccttcaacgattacggctggaacacctgggcgaccagattgtggaaatgcgcgatcccgtgctcggagataccgctgccgctgttatccgccataatgcgcccctggccgcgatagccgcgggacttcagccccttctgcacgctttccaccaggcgtaaatcttccgggcggaacacgtcgcgataccactcaatcagcgctttctgatcgtcagtcagctcttcgttggtgaaatagatgtcgtaattctgcagagtggtctcttcatccaccgggaattcatagataacggtcatcatgcccttgatcggcgtgacgttgaacatggtgcacggccacagccagaaaccatgaaacgcggcgtcggtaccctcttcgaatttaaacgactgctcggacggtttggcgaagccatactgcagcgtccatttgccgtgcatggtgtgccagtagcggtcaacctggacggaatccgagaagcccgggtgcgccggaccgcagtggtaacattccagatagttatcgacgatatttttccagttcgccggggtgagggtggtaaagcgcgccgccagtttcagatcatgcacgtccggacaggcttccagcactttgtcctgcagccccggtagctgcgtttccacactctccgcttccggattcatattgataaacacaaagccggcatactcttccaggcgaaccggcactagcgttgccttttcgctatcgaaattcgccacgttttcgcagttgcgggcgtgggcgagattgccgtccagcttgaaggcccaggcgtgataggggcaggtaatcacgtttttggctttgccctcgccgctcagtagctggtggccgcggtgtgggcagacgttatagaaggcgcgcagaatgttgtcgcggccgcggacgataacgatattttcgccgatgatctcccgggtaatgtaatcgttcggccgagcgacctcgctgccgtgggcgacacaaatccagctattggcgaagatgcgctctttctcgtgctcaaacgcctggctgtcggtataaaaacgggccggaatggtccaggcatcctgcggattagcgcaaaagttaatcggcagggtgaagtcagggctcaaattgctcatgtagggtctccttgtgattattgtcagtaagaggttttacagcgactggccgtcgcctttgagtaccgcgccaaccggcagcgtctcggctttaataatgggctcgggggtatgggtttctatctgatggaccggaacgtgggcgtagtcctgttttaaccagcgcacgaagccgccggttttaatcagtaaaatggccaggaacggtagggcggtcagcaccacggtggttttcatggtctcaagcgaagcgccggtaaacagaatcgacagcgggatgagggtgatcaccacgcaccagaacaggcgcatgccgcgatccggatcttcgccttcgcgcaggttacgggtactggtcgccgccatggtgtaggccaccgcatccatgtgcgaggcgaggaatacaatcatcacgaacagataggcggcgaggaacagcttacctgccggtagcgacatcaggacctgctggacggcggtttcgccgccgagagtctgcatcacctgtggtacgttaatcacgccgttaacgaactggtgcatggcgtagctttccatcaccccgaagaaaaaccagcagccggcggtgctaccgaggagcagtccccagatcacctctttgattttgcgcccgcgggagacgcgggtgacgaacatcgccacgcctggggtgtaggagatccaccacagccagtagaagacggtccagttgcgggtaaaggcgccgtcgccgagcgggtcggtaaacaggctcatctgcaggaagttttgggtcgtcaggccgacggcgttaatgacgttattggtgatgaattcggtcgggccaaccagtaataccaccaacggcagcagaaacgccccccagccgaccattttgctcaggcgctgcaggccgttgttgatgccaatccacgaactcatgcagaaaataccgccggagagcaggatcacaaatgcctgcacggtgaagttatccggcagtccggtcagcgctgacaggccgcgggtgaaggtggcggctgcgccttacccgggctacttgctgtgccgttttttttgccgggtggcggctgtgccttacccggcctacacactacattatcgcgcgattgtagccccggtaagcgcagcgccaccggggagcggcggggtaattacgccaaaatggccttgcagatagcctcgctaacctgctgcgttgaggcactgcctttcatgtccggagttttcggtccgcaggcgatcgtctgctcaatcgccgccagaatgccatcgtgagcggcgtggtagcgctcatcgccgttgccgaggaaatcgagcatcatcgccccggcccaaacggtggcgatcgggttggcgatatttttaccgtaaatatccggcgccgacccgtgaaccggttcgaacagcgacgggaaattgcgctccggattgagattggccgacggcgcaatgccgatagtgccggtacaggccgggccgagatcggagagaatatcgccgaacaggttggagccgaccaccacgtcaaaacgctccggctgcagcacgaagcgggcgcacaggatatcgatatgctgcttgtcccagcgaatttcgggatagtttttggccatctcttccacccgctcatcccagtagggcatgctgatcgccagaccgttggatttggttgcggaggtcagcgttttgcgtgggcggcttttcgccagttcgaaggcgtagcgcaggatccggtccacgccgcggcgggtaaagaccgactcctgaatcaccacttcatgctcggtgccttcattggcgcggccgccaagggcggaatattcgccttcggtattttcgcgcaccacgtaaaaatcaatatcgccggcctttttacccgccagcgggcaggggacgccggggaacaggcgcaccgggcgcaggttgacgtattgatcgaactcgcggcggaacttcagcagcgacccccacagcgaaatgtggtcgggaacggtatccggccagccgacggcgccgaagtagatagcatcgaagccctgcagctgctcgcgccagtcgtccggcatcatcttgccataatgggcgtaatattcgcagcttgcccactccatctgctcgaagctcagcgacagatcccaacgctgtgcggcggcttgcagcacgcgaatcccttcaggcagaacttctttgccaattccgtcacccgggatggcggcaatacgacaggtttttttcattccggttctcactttttaacgatgatgtttgaccacctgcctatcctataattgactggttcataattaatcacgctaactggtgaaacataaaacacagatcatgaataatctgccgctgctaaatgatttacgcgtctttatgctggtcgctcgccgggccgggttcgccgccgccgccgaggagcttggcgtatcgccggcgttcgtcagcaagcgggtttcgctgctggagcaaaccctgaatgtgatgttgctgcaccggaccacccgtcgggtcaccattaccgaagagggggagcggatctatgaatgggcgcagcgcattttgcaggatgtcgatgagatgatggatgagctttccgacgtgcgccaggtgccgcagggaacgctgcgtattatcagtagcttcggctttggccgtcgggttgtcgccccggcgctgtcggcgctggctctccagtacccgcagctggagctgcgtttcgatgtccaggaccggctggtggatttagtcaatgaaggggtggatctcgatattcgcgtcggcgacgatatcgcaccgaatctgattgcccgccagctggcggccaatcaccgcgtactctgcgcctcgccgcagttccttgcccgccatgcgccgccgaaacagctgagcgatctggccgcgttaccctgcctggtgattaaagagcgcgatcatccgttcggcgtctggcaattgcatagcaaagagggccagcacgccatcaaggtaaccgggccgctctcctccaaccatggtgaaattgtgcatcagtggtgtctggacgggcaggggattgcgctccgttcgtggtgggacgtccgggagaatatcgccagcggacatctggtgcaggtgctgccggactactggcagccggccaacgtctgggcggtttacgtctcccggctggcgacgtcggccaaaatccgcaccaccgtggagtttctgcgccactactttcagctgcactatccgcagcatgagccgacggccagcgccgtcggcagaggcgattaaaccccaaggcggtcgcgcaggctgtagtaggcggcgcccatggcggtaaaaggaatgcgcaggctgcggccgcccgggaacgggtagtgcggcagtttggcgaaggcgtcgaaacgctcggcgtcgccgcgcagcagctctgaaatcaagcgtccggcaaggtgggtacaggtcacgccgtggccgctgtagccctgcatgtagtaaatattgttatcgagacgcccgaactgcggcatccgcgacagggttagcaggaagttgcccgtccagcggtagtcaatcttcaccccctgcagctgcgggaaggttttcagcagtttcggcataatcagccgctccacgtcgtccggatcgcgcgcgccgtagaccacgccgccgccgtacagcagacggttgtcgccggtcagacggtagtagtccagcaggtagttacagtcttccacacagtagtttttcgggatcagcgagcgggcgacctcttccgacagcggagcggtagtgaccacctgggtgccgcacggcatgctgcgtttcgccagctccggctccagtttatcgccgagataggcgttgccggcgacgatcacgtagcgcgcggtgacctggccgcgcgcggtgctgaccaccgccgggctggtgtgctggatgcgggtgaccggcgactgctcatacacccggccgccgttcaggcgaatggcatccgcttcgccgatggcaaggttcagcgggtgaatatggccgccgctgtggtcgagcagggcgccgacgtagcggtcgctgtccacttcgcgacgaatggcctctctgtccagcagctccagctgggtgttgccgtagcgctcccagttggctttctgctcttccagggtttccagctgtttatggttcatcgccacgaacaggccgcccgggcggtaatcgcactggatctgataccgctggatgcgttcgcggatgatatcgccgccttcgaacatcatgctgccgagcatttttgccgcatccgggccgtagttcttttcaatgacgtcgatatcgcggctataggagttgaccagctgaccgccgttgcggccgctggcgccgaagccgatgcgcgccccttccagcaccaccacgtcgtagcccatttcggccagatgcagggcagacgagaggccggtgtagccgccgccgacgacgcagacgtcacagttgatggatccctccagcgtcgggaacggttcatacttgttggcgctggcggcatagtagctagtggtatgttcagtcatgatcaagactccagggcaatccagatggttttcagttcggtgaatttttccagcgcgtgcagcgatttatcgcgcccgttgccgctctgcttgtagccgccgaacggaacggtcatatcaccatcgttatagttgttgacgaagaccgagccggccttcaggcggcggctcatgcggtgggcgcgggagagatcgcgggtccacaccgcggcgcccaagccgtagtcgctgtcattggcgagctttagcgcctcttcttcgcttttgaagcgggtcaccaccagcaccgggccgaagatctcttcccggctgagggttgatgccgggtcgacgtcaacgaaaatggtcgggccaacggcggcaggccacgggtttttccgtccgtcgaggaacagggtgctttggctttcgccgccgcgaataaagctatgcacgttgtcggcatgggtattgtcaatcagcatgcccatggtggtgtccggatcgagcgggttgcccggctgccagtgttgcgcctcagctttcagccgcgccaggaactcgtcagcgatgctctcctcgagcagcagacgggtcccggcgatgcacacctgtccctggttgtagaagatgccgccggcggtggcgcgaaccgcttgttgcagatccgggcaatcggcgaagacaatgttggcgctcttgccgcccgcttccagccacacgcgcttcatattgctgtcgccggcgtctttcagcagctgcttgccggtgcgggtggagccggtgaaggtgatgacttcaacatcaggatgcagggccagcgcctgcccggcctcgtggccaaagccgctgaccacgttcaacacgccgtccggcaggccggcctctttcgccagcccggccagacgcagggcggtaagcggcgatttttccgagggtttgaggattacgctattgcctgccgccagcgccgggccgagtttccagcaggccagcagcagcgggaagttccacggcaccaccgcggcgatcacgccaattggttcgcgaacgatcatcgccagctcgttgctgccggtgggggccacttcgccatagactttatccagcgcttcggcataccagcgaatggcgcgggcggcgccgggaatatcgtcgcgcaggctgtggcgaatcggcttgccggtatccagcgtttccagcagcgccagctcttcacgatgggcctccatcagattagcaaagcgagtgaggatcgctttacgctgtgcgggggaggcctgcgaccagtcgccgttatcaaaagcctggcgcgcggctttcaccgcccgttcgacgtcggcttttttaccgcgggcgacctgggctaatgtctgctgcgcggcggggtcgatagtctcaaaggtggtattatcggccgcggcgcaatattcgccgttaataaataagcgcgtttcaatggccaggtttttcgctttttcctgccagtaagccaggtgctgaaaattcatcatgactccttaaaaacattatcggcaaattaatcagtgcggcgttttcaggctgcacgggggcactgcgccgggcgcagggcatagcgtatccccggagttgaataccgttttattctcctgatttttgacgggttgtttgcaacccgaattattcaggagcgagtcgccattcactggcgttaattatttcagggccaacaggaaataatattccgtacggcgcagacgttattactacgagttcttcgccgcgacgaaaatagtttttccgtcgcgacaggcctgaagtaagcctgaacttcgttcaggcgaaataatcagaatgtggtgggggtgtgggcactgatgatgcggcagatgcctgccgaggtgttgctgaagctgtgcggaatgccggtattaatggcatagctctgtccagccaccaggtggtacgactgaccgttaatggtcagcacgatctcaccttccagtatggtgcctatctcctcaccctgatgcttaatcctctccccggtcgtggttccaggctggtaagtttcaaaaatcatcgccagcgtacggttcggatttccgttatgaaccagcttcatggaaacgccctgacttcccatctcaatcaggtcatcctgattaatgaccacctggggttcgtccggcttttcgggttcagaaaagaattccgagagcgacagcccatagactttcagcagcttttgcagcgtactgatggcaggactgactttatcctgctctatggtgctgatggcactatgtgttaacccagacagttcggcggcacgacgctgtgagagacccagctgttggcggatctctgacagacgtttccctggcgccagtccgtcatcgctcatatttgcatttccttaacggtagtggtcagcgccgccgcttttcagcatgatggccctgacaggcggtgataaaaccatcaaacaacatacgcgacagggcgtattcgctactgttccattctggatgccactgtacgcccagcgcgaaaggatgatcgttcacgctgaccgcttccaccagtccatccggcgctcgcgcctccacgcgcagctgcggactgagggtttttgccccttgcccatgtagcgagtttacccaaaacgtgttgcagcccggtatcaattgcgacagcaatcctccttcctgaacctcaacctgatgggacggcgcatactgctgctcgacgggcagttcaggatcttcgcgatgttcaaggagctcaggctgctcgaacagacgacgatacagagtcccgccggtggcgacaaccagttcctgcagtccacgacagatggcgaaaatggggatgcgcctttcgagcgcggcgttaatcagcgccatgctcagaagatcacgcccggggtcggcgtcaggctcatcgccgttttcaccataaaggtgcggctgcacgttgctggggctgcctggcaggtagatcccgtccagtttatcaacgaccacgttcagtagctccggctccgccagcgcatgcggcagggcaatcggcagtccgccggcgttaacaattgcattcaggtacttttcttgcaaggtctgggtctggtgacccttaagcctgtttctacacatcacgacgccaataactggcttgtacattatattttccatgatcgccctcacaaagtggactaaattatgaccgctatagcgggtttaacggccatatcgttcaatattttctcaatctagcagtggaaatagccctttgcaaacttaatttaacatttgacaaacaatttatttgcatacacagtcgatggggtggacattatatttaacggtctgagtgcaggaccgaaacccaaccaacggcggtgaatcatggaaaccaatatcgtagaagttgagaattttgttcagcaaacggaagagagacgggttagcgcgttcgcgaaagaagtgaagcgctacctcgaaacctaccctgatacccagtatgtcgatgtcctcctcactgacctgaacggctgcttccgcggcaagcgcatcccggttgccggcctgagcaaactggagaaaggctgttatttcccggcctcggtgtttgcgatggatattctcggcaatgtggtggaagaggctggtctgggccaggagatgggcgagccggatcgcagctgcatcccggtacccggcaccttaaccccttcggcggctgacccacaatcgatagcccaggtacagctaaccatggttgatgaagatggcgctccctttgacgttgagccgcggaacgtactcaaccgcctctggcagcagttgcgccagcgcgggctgttccccgtggtagcggtagagctggagttctatttactggaccgcaaacgcgatgccgaaggctacctgcagccgccgtgtgcgccgggcaccgacgatcgcaacacccaaagccaggtctactcggtcgataaccttaaccacttcgccgacgtgctcaacgacatcgacgagctggccaaactgcagctgatccccgccgatggcgcggtggcggaagcctcgccgggccagtttgaaatcaaccttcaccataccgataacgtgctggacgcctgcgatgatgcgctggcgttaaaacgtctcgtgcgtttgatggcggagaagcataagatgcacgccacttttatggcgaagccttatgaagagcatgccggcagtgggatgcatatccacatcagcatgctgaacaataaaggggaaaacgtgctggtggacggcgatggggaagactctgcgctgctcaaacgcgcgctggccgggatgatcgatctgatgccggcttcgatggcgctgctggcgccgaacgtgaactcgtatcgccgcttccagccggggatgtacgtcccgacgcaggcttcgtgggggcataacaaccgcaccgtcgcgctgcgtattccgtgcggcgagcggcagaaccaccgcgtggagtatcgcgtcgcgggggcggacgccaacccgtatctggtgatggcggcgatttttgccggcattctgcacgggctggataacccccagctgcctttacaggaagaggtggaaggtaacggtctggaacaagagggcctgccattcccgatccgccagagcgatgcgctgtgggagtttatgcagaacgatcacttgcgtgagcgcctcggcgagcgtttctgccatgttttccatgcctgtaagcatgatgaattactgcagtttgagcgtcttatcacagaaaccgaaattgagtggatgttgaaaaacgcctgatggtcgccccgcgaggggcccataagtttggtaatcagtagcatcatacggcctgagcggagcctggccgacgtttttgctgggagcccagccatttcccggatgtcgcgttaaggagcgcaggcggcaacggggcttcagttaacgacacagtgtgtgacgaggaaatgagatgatgcagatgttcaaatatccgcagggagagggaggccgctcaggccgcattggatgccagccagctaccgcttaccggtccgtcttacccttttatctatgccttacccctttgctaagcaggtttgtcacgcggacgttgggcccgcaaactgttaacagcaagggggggatgggcgatggctattaatcctccggcgcataacgccgctcaggcgggcagaccgcgtctgcgtaaatccctcaaactctggcaagtggtgatgatggggctggcctatctgacgccaatgacggtgtttgataccttcggcatcgtctccggcatcagcaatggccacgttccggcgtcttatctgctggcgctggctggcgtgctgttcaccgccatcagctacggcaaactggtgcgtcagtttccggaagccggttccgcctatacctacgcgcaaaaatccatcagtccgcacgtcggctttatggttggctggtcgtcgctgctggattatctgtttctgccgatgatcaacgtcctgttggcgaagatctatctctcggccttgttccccgaagtgccgccgtgggtgtgggtagtgacctttgtcgctattctgaccgccgcgaacctgaaaagcgttaacctggtggccaacttcaataccctgttcgtgctggtgcagatttcgatcatggtggtgtttgtcattctggtggtgcaggggctgcataaaggcgagggggtgggtaccgtctggtcgctgcagccgtttatcagccagaatgcgcatttgatcccgattattaccggcgcgaccattgtctgcttctcgtttctcggtttcgacgcggtgaccaccctgtcggaagagacccctgacgccgcgcgggtgatcccgaaggcaatttttctcaccgcgatgtacggcggcattatctttatcgtcgcgtcgttctttatgcagctgttcttcccggatattcatcgctttaaagaccccgatgccgcgctgccggagattgcgctgtacgtgggcggcaagctgttccagtcgattttcctgtgcaccacctttgttaacaccctggcgtccggcctggcctcccatgccagcgtctcccgtctgctgtacgtgatgggccgcgacaacgtcttcccggagcgcatttttggctatgtgcatccgaaatggcgtaccccggcgctgaacgtgattatggtgggcatcgttgcgctgtcggcgctgttcttcgacctggtgaccgccaccgcgttgattaatttcggcgcgctggtggccttcaccttcgttaacctgtcggtgttcaaccacttctggcggcgcaaggggtacaacaaaacctggaaggatcgactgcattatctgctgctgccgatggtcggggcgttgacggtcggggtattgtggatcaatctcgaggccacctccctgacgctcggcctggtgtgggcggcgcttggtctgctgtacctgacttatctgacccgacgcttccgcaaaccgccgccgcagtttgatgccgctaaagcggagcaggcctgggagtcataggttctgaggcataaactgaacgaaggcaggcccgcaggcctgctttcgttttggcttcggtaagggacagtacaggacggtaaagaaatcagcagaaaacggtggggaacggaaggtattatttcttctttttatggacaggtaactgactggcgcgccgctctttgaggtacgacaccaggctgtagatggcgacgcccagcagcgccaccgcgacgataaagagaataagacccgacatagaccaacctaatattctgtttggaaagggaaaaagatacagggctctgtgtgaagataacatcgggatatgtctgaaagatgacgcctcatcgcgagaatatccggcggcggggttgtgataaaatatttcccgcagggatgtgaccgcctgggtttcacctgaaatggcgtaacactccgttaagtgattttacagaagtgcggcctacagcgagttacgctgaccgcgaataagaacgatctgagagtcagtcatgtataagaaaaccctcagcctgctgggcgtagcgttggcgctgtctgccttcgccagtcaggctgaaagtgaacgtcaggcgagccgcgagcggatcgtggagcaggtcctcaagccgtgtgaaggcaaaaaggcgggcgataaggtggtgattaccgatcgccgcggcggcgagcacgaggcgatctgtaccctgacggcggttccgctaccggagtagcgcccgccgcacggtgccgcttatcgataccgcggcgcaggctgtccggttcgcgcgctggtaaacagcgccagtctggactgctcaaaagtctcccacagtcccaggtcatgaaccggtggtaaggtgacctgttcccccatctccagccccctgagagcggcgtcaaccagatcctcggtggtcattaccgtgccgctgggcagagcgtccagcgccacgccggaggtcggccacagatcggtagcggtcgccgccggcaataccgcctgaatacgcacgccgctgtcggcaaactcctcctgcaggccgcgggtgaagctcaacacccaggctttgctggcgctgtagactgcgctgcccggcagcgtatgcagcgcgaggatagaggcaatattgatcagcgtcccccggcgtcgtggggtgaaagcggccagcgcggcatagctcagacgcagcagcgcggtggtgttgagcgtatgaatcgcctggtgctcgcgtggcgtactggcgagaaaacccgccaatttcgcggtgccggcgttgttaatgaacaggtcgatggcgggatcctgctgcagacgctgctctacggcggcaatcccgtgctcttcgctaagatcggctttgaggatgcttgcctggatggcgtagcgcgcctgcagctggtcggcgagcgcctgcagacggtcttcacgacgggcggcgaggatcaggttgtagccgcgggcggcgagtcgttcggcatagatcgcgccgatacctgaggacgcgccggtgataaaagctgtgtgcgatggttgggtcatgagaaatgcctcgtaaaaggttgcattattaaaccaaattcagcatgagatattaggtttaataatgcaaccattttgccaggactttttcatttttgcttgtcgcgggcagcgtttagtcgttcagcgggatagcgatggtgatgtccgccggggccagctcacggccatctgccgcctgcaggaccagcttacgcaggggctggcgctgctggcggtcaatgagccgggtcgccggttcgtcaggatcgaacagatagtcgtctgcccactgggagagggcgaccagcaccgtctgcagggcacggcccttatcggtcaggacatactcctgccaggcgctgccgtcggaggccggctgcaggcgcaggatgccttcatccaccagcattttcagccgcccggcgagcatgtttttggcgataccgaggtttttctggaattcgctaaaacggcgcaccccgcgcagagcatcgcggacgatcagcagcgaccaccagtcgccgataacgtcgagggagcgggcgatagggcaacagctgttttccagacgggtacgtttcacgaaagcctccaggttaattgtttcattataaaactctttgcccggcaggggaaattttcggctacggtctaagtttgcgagcgattaccaggaaaaatgtcataaatccggcacaattaacgcgatgataataaatgactaaggatgaagggatgaaaaaacgtctacttgccgccgccgttgccggcgcggtgatgttatccgctggcgctcaggcgcaggacacggccgccccggaggggtatcagctgcagcaggtgctgatcatgagtcgtcacaacttgcgtgcgccgttggccaataacggcagcgtgctggagcagtccaccgccaaggcctggccgcagtgggatgtgccgggcggccagctgaccaccaaaggcggtgtgctggaggtgtatatgggccactatatgcgcgaatggctggcgcagcagaagctggtgaccagcggcgagtgcccgccggaaaacgcggtttatgcctacgctaacagcctgcagcgcaccgtcgccaccgcgcagttctttatcaccggcgcgttcccgggctgcggcatcccggtgcatcaccagccgcagatgggcaccatggacccgaccttcaacccggttattaccgacgactccccggcgtttcgcgagaaagcgctgcaggcgatggaaaaagagcgccagggaatgcagttgaccgagagctacaagctgctggagacgatgatcgattaccgcaactcgccctcctgcaaagagaagaaggtctgttccctgagcgagggtaaagatacctttagcgccggttatcagcaggagccgggagtgtccggaccgttgaaggtgggcaactcgctggtagacgccttcaccctgcaatattatgaaggcttcccgaaagatcaggtggcgtggggggagatcgccagcgataagcagtggcaagtgctgtcgaagctgaaaaatggctatcaggatagtctgtttacctcggtggcggtggcgcaaaacgtcgccaaaccgctggttaaatatatcgataacgcgctggtgggcgagggagccagcaaggcgaaagtcacgctgctggtgggacacgactcgaatatcgcttcgctgctcaccgccctggattttaagccctatcaactgcccggccagtatgagcgcactcctatcggcggcaaactgctgtttcagcgctggcatgacagcgccggtaatcgcgatctgatgaagattgagtatgtctatcaaagtaccgagcaactgcgtaacgccgacgcgttaaccctgcaggccccgccgcagcggatcactctggcgcttaacggctgtccggttgatgaccagggattctgcccgctggagacctttaaaaaggtgatcaacgaggcggcgaaataacgaaaaaaacccggagcactccgggtttttttagcaggttagggtgagcccaggtggggataaacctcctagacgtttttacgctcaatcgtctgttcgccccagaacaggctgtctttatcggttttggcaaaggccagcgccagcacttcgtcgctgccttcctcccagatttgctccgccagtttctcatcgtagtgggcgacttcgaaaatcgcctcggcaatttccggtgaggtgttacgtaaacttgcccattcgccgacgcgatgtgcttttgcttcttgagttggcatagtgctcctcctgcagaagattagccgtgcagtttaacggccagtttggcgacatgttcaccctgatagcgggcgatggctaactcttcctcgctcggctgccgcgagccgtcgccgccggcgatggtggttgcgccataaggggtaccgccgcgtacctgggaaatatcgaatagctcctgggcgccatagccgatcgggacgatgatcatgccgtggtgggccagcgtcgtccaggtcgaggtaatggtttgttcctggccgccgccggtaccggttgagctaaatacgctggcgattttgccatacagagcgccggacgcccacagaccgccggtttgatcgaggaaagtacgcatctgaccggacatgttgccgaagcgcgtcggggtaccaaagatgatggcgtcatactctgccagctcctgcggcgtggcgacgggcgcgttttgcgctttcccgcctgctttggcgaatgcttcagcctgcatggtttccggcacgcgcttcacaaccacctcaacgccgtccacccggttcgccccatcggcgacggcgtgagccatggtttcaatgtgtccatacatggaataataaagcaccagaattttagccatttccatcactcctcggttgcattataagccagcaaaatagctggtacctttaaagataaagcctccgccggagagtgcaaatccaacgggcatttgtttgatttataacaaaatgacaaagcgttatttacttttccttgcaccgcgcggcctgaaaggaagtgaaggaggaagcgttgcgcctgctattttggccgctgcggcgaggatgtagcatcaggatacatttttgctgactattttttcttcgccagcagagtcggttaggagctgttcgcggcgcgaggaagcttttttcgcccggctttgtttctggatattacattcgccgccgtcagccgcagtcattcactaaccttatagatacgcggcaggacagcggcgtcgccgctcccgcgtaatgcactatgatgtctaacctaatggaggtcagtaatggcaaaccatcgtggcggttccggcaactttgccgaagaccgtgaaagagcatcagaagcaggacgtaaaggtggccagcatagcggggggaattttaaaaatgaccctcagcgcgcctcagaggctggcaaaaaagggggtaaaaacagtcatggtagtcgtgaaagttaacgcgcgactcgcactgttctctttgatgcggtgttaatctccccgacccaaccgcatcgccctcgccgccggcatctgccggcggtttttttatctgtcggtggttgcgctcccgccgggcggattgcacactggtcgcccgttaatcgtcatggctgtcttatgtcttcgttaaaattctccgttagccgccaggaagcgctccttatcatgatcaccatgttctggggagggacgttccttgccgtacagtacgcggtgagcctcagcgggccgctgttttttgtcggtttgcgtttcgcgaccgccgcgctggcggtgggcctgctttcgctgcgcactctgcgcggtctgacgtggctggaggtgaaggccggggtagcgattggcgtggcgattgcgctggggtatggcctgcagacctggggactacagaccatctccagcagtaaatctgcctttatcaccgcgatgtatgtgccgctggtgccgctgctgcagtggctgtgcctgggacgtatgccgggggtgatgtcctgcgtggggattgtgctggcctttattggtttaattctgctggccgggccggaaaataatctgctggcgcttggcgtgggggagatgatcactctggcaagcgcggtggcgatcgcggcggagattatccttatcagcgcctgggccggaaaagtcgatgtccgccgggtgacggtggtgcagctggcgaccgcgtcgctggtggctttcgccgccatgaagccggcgggtgaatcggtgccgtcgttgacgccggccctgctcggtgtcgcgctggggctggggattttcagcgcgatcattcaggtgaccatgaactgggcgcagcgcagcgtctcgccgacgcgggccacccttatttataccggtgaaccggtatgggccggtatttttggccggctggccggtgagcgtctgccgctgctggccctgctcggctgcgttttgatcctcgcgggggtgctggtgagcgagctgaagtggaagcgcaagtcaccgccgcagattgcaacgaatgacgatgcgcagccgctcacggacctggccgatcgccgcgagccataatattttccttctgacccgacagcgacgcttatccgggctggtattcgtccggctctgattgtctccaggcccgtgccagcgcagcgccgccgggcgatggcatcaggcacggcgtcgcttttatgccgggtggcggctgcgccttacccggcctacgttcgtacgacctgccgttaatttattcaccattgttgctgaaactgccggtgctgacggcctcaaaatcgctgagacattcccggaaggccgtggcagtctccaggcccgcgcaagcgcagcgccgccgggcggtcaggttccgtgcccgtggtggtgccggatggcggcataaatgccttatccggcctacaggatcacaccacccaggcccacaccgctccctgcgccaacgccgcgctaatgtggcttacaccggcgttaccctggcctccttcgcctcgcgcgtcccgcgatgaagcagcgcgtgcagcaggatcgccccgaaggtggccgtgccaatcccgcccagcgtaaagccgcccagcgacagcgcgaaatcgccggcgcccagcaccagggtcaccgacaccatgatcaaattgctgttttgactcagatccacccggttttgcacccagatccgcgccccggcgacggcaattaagccaaataccacgatcgaggcgccgccgatcaccggcccgggaatggtgtggattaatgcgccgaacttcggcgagaaacccaacagcatggcaatcagcgccgcggcgacaaacaccagcgttgagtagaccttggtcaccgccatgacgccgatgttctccgcataggtggtgaccccgctgccgcccaccgaaccggagagcatggtcgccatcccgtcgccgacgaaggcgcgccccatgtacgggtccatattgcgcccggtcatcccggcgacggccttcaggtgcccgaggttctcggccaccaggatcaccgcgaccggcgcaatcaacatcatcgcctggccgttaaaggatggggtggtaaagtgcggcagcccgaaccacgccgcctgggcgaggggggagaagtccagcggtttgccaaggcccaggccgttagccagcagggcgtacagcgcgcaggcgacgatcaggccgaccaggatcagcagtcgctgcagcatcccgcgggtaaataccgccactatgccgatgcagagcacagttaacaccgccatccagctgtcgaaggcgctggcggagacgctgcgcacggcaatcggcgccaggttcaggccgatagccatcaccaccgcgccggtcaccaccggcggcatcaggcgctcgatccagcgggtgccgatcttcatcaccaccagaccaatcagggtgtagaccagcccgcaggcgatgatcccgccaagggcgacgctcagatgagggttcagcccctggccgttaaagccggtaatggcgatcaccaccccgacaaaagcggcgctggagccgagatagctcggcacccgtccgccggtgacgacaaagaacagcagggtgccgacgcccgacatcagaatagacaggttcgggtcgagccccatcaacaacggcatcagcaccgtcgcgccgaacatcgcaacggcgtgctgcacgcccatcaccagcgtttgcccggccgacaagcgttcatcgggggcgacaacgccggattcggcggcaggagaggtcagcttccagcgaggaaaatcgaagagtgccatgatgatatcccgggttaaaggttaacaagcgggtcgcataagcgtgtgatagccgcggtcaaaccacatcagtccccggggctccgggtgacgggtaatggccacgacgtgacaaaacagaatgtcgtgcgtcccgacgctgacgcgctggtcgatgcggcagtcaaagctgaccagagccgcctccagccgcggacagccggtggcgccggtctgccagtcggcggcggcaaaacgctcgtccattgccgttttaccgccaaacagcgtcgacagggcctcctgtccggccgccagggtattgacgcacagcgtgtggtgttcgctgaacaccggccacaccgaagccgagcggttcaggcagaccagcagggtcggcggcgtgtcggtaacgctgcagaccgcgctggcggtgaaccccgcccggcccgccgggccatcggtggtaataatgttaaccgcggcgccgacgtgggccatggcgtcacggaaactcgctttgtccgttaactccatcgtaaactccttatgccagcaggcaggcttcatcaaaggacaggcgcggcaggcggccgtacagcttgccggggtcgccatagccgatgttcaccagcaagttgcttttccagccgttgtcggcaaaaaatgccgcgtcgactttttcccggtcaaaaccggacattggcccggtgtcgaggccccgcgcccggcaggcaaaaatcagatacgccgcctgcagggagctgttgcgaaacgcggtctcttccgccagctgcgggctggaggtaaaccagctgcgggcgtcaccgtggggaaacagggtcggcagccggtcgtagaaggcgctatcccacgccacgatggcggtcaccggcgcctgcatggttttctgcagattgccgctggagagcgtcgggcgaagtttctctttgccttccgcgctgcgcacgaacacgatgcgcgctggcgaacagttggcggaagtcggccccattttcatcaggtcccagacggcctgcagctgcgcatcgctcaccggcttatccagccagccgttgtgggtccgggcctgggtaaacagcgtctcgcaggccgtgtggtttatcgcgtcgttcatcgggtctccctggcgaccggcagcatagcggacagcccgtcgcgtaaaatggtattaaaggtatcggcgtcggtgacgttacaggcatgtccgccccacggcatttccacgagctggctgccggggatcgccgtctgcagcacgcgggagcaggaggcggggaccagcaggtcgtcagcggcgctgataatcagcgtcgggcaggcgatggccgacgcacggcgtgaaaaatcagcctgcttcagggcctgtagccgcttcagcagattctctttgccctgaaaatggctgatggcaagcgcatcttccgcttcgaggcgcggcaggcgcgcggccatccattccgccgggtagagaaatagcggctgcgcttcgacccacgcctgtgcgccgccggcatgcagcagacgctcgcgcacctggaagcagcggcgggtatgcggcgacagcgacagccagccgttgaccagcgccagggcgctcaccgcctcggggcgatcgagcgccagctgcaggccaatcagcgcccccagggcgtggcccaccagcgcgaagcgggcgatccccgccgcttgcagagcgctgaacagctccccggccatcgtcgccaggctgtagccggcgggcagcggaccggcgttctccccggtcccgttatggtcataactcaccagctgatactgttcctccagcgccgcgcgctgcgccagccagtagccgccgcccccgcccagaccggcgctgaggaccaccaccggcgcgccgggccacggagccggagcaatattgagcctcatcatgtcggggtaccgatatgggcgacgctggcgatttccaccagcgcatcgggcttcaccagtccgcactgaatgcagaagcgcgccggtttatcgccggggaagaactcggcgtagacctcgttaatcgcggcgtaatttgtccagtcggtgataaagatgctgttgaaagtcacatccgccatactcccgcccgccgtttcgataacgctcctgatggtctccagcacgtggcgggtttgcgcctttgggtcgccgatgtgcaccacattgttttgcttatcaaacggcagggtgcccgagacgtagaccacgccatcggcgagcgtccccggaacaaagggggcaatcggcgcggtggtgcctggcggaataatcacctgtttaggcataacgtttctccttggctaaagccagcggggcggcgggggacagcgcgtggcagaagctctcaacgtcgctgacccagccgaaaaaggtttcaatattgaacagcgccgcctgctgggcgaaggccgggccggcctgatgggtggcatcctccagcacgatgccgaagtattcgagaaagaagccatcgcgcagcgtcgattcgacgcagacgttggtggcgatcccggtgaacaccaggtggcgtatgccgcggctgcgcaaaatgctgtcgagcggggtgttaaagaagccgctgtagcgcggtttcggcaacacgatatcgccttcctgcggcgtcagctcgtccaccagctgataatcccagccgcctttcgccagcagcttgccctgcagctccggacgctgacgcatcgttttcagcgcgttggatttgtgatagttcggcgagcccgggccgccagcttcaacatactgatcatcccagccattctggaaccagataatcaacatacccgcggcgcgagcggcggcgacggcggtattaatattgtcgataaccggccgggtagcggagacgtcaaagccggcgagatccagataaccgccctggctggcgtaggcgttctgcatatcgaccacaatcagcgcgctctgctgcggcgcgaaggacagggattccgggcgagcgggaagggtaatcatcaggccacctcacgggtaacagaagcaatgtggttccggcagcgcatcagcggctgaatgcgttcgccaaaggcgtcaatgccggcaagaaaatcatcaaaggtcagcagcacgccgtcggtgccgggcacgctcgctacttcatcaagcatacgggcgacgctggcatacgatccgaccagggtgcccatgttaatgttgaccgccgaggtggggtcggccatctggcgcacgttggtatcgctgccggagcgggtatctttctgactctgctcggtgagccacgccagcgcttcttcatcggcgcccgctttgtaatgttcccatttggcgcgcgccgcctcgtcggtttcgtcggcgatcaccatgaacagcacataggaccccacgtcgcggccggttttttccgccgcctgcatcatgcgtgcggcggtcggggcaaaggccgttggcgtgttgacccctttgccaaagcaaaagttgtagtccgcatgctgggcggagaaggccatcccggcatcgctctgcccggcgcagatcaccttcatcggctgcgacgggcgcgggctgacacggcagtcgttcatggtgaagtagtcgcctttgaaatcgctgcgcccggtgccccacaggtcacggagcacctggacgtattcggtgagatagtcatagcggctggcgaaatagtcatctcccggccacatgcccatctggtcatattccggtttttgccagccggttaccagattgacgccaaaccggccgccggagatggagtcgatagtggaggccatccgggcgacaatcgccggcggcagcgtcagggtggcggcggtggcgtagatctggatcttcgaggtcaccgcggccaggccggccatcagggtgaaggactccaggttgtgatcccagaattcagttttcccgccgaagccgcgcagtttgatcatggagagcgcgaagtcgaaatggtagtgctcggccttctgcacgatggccttattcagttcaaaggtcggcatatactgcggggcatgggtggagatcagccagccgttgttgccaatgggaacgaaaacaccaattttcatacctacctctctgcagtcatggaagatgggttgcgatggtgcggcatcctgcctctccctggaccacctcgcagaaaaggtaaagcaaaggcgatgccagttttataaatgctaatgttattaatgtgttacttttgagttgctaaaaaggacgataaaaaagtggactggatggtcaaaatcagtgcacgaaaaaacggcagtcatgcgcaatcagggtgcatggggtcgtgtcggcgcagggcttttgctatgctggtggcgtcaactgaaggagaggatgtatggcacagggcgcggtgaagaaaagcggcaaacgttcacaagcggtcagcgccaaaaaggaggccatcctggccgccgcgctggaggcattttcgcaatttggtattcacggtacgcggctggagcaggtggctgagcgcgccggggtatcgaaaaccaatctgctctattactacccttcgaaagaggcgctgtatgtggcagtcctgcagcagatcctcgccatctggctggcgccgctgaaggcctttcgtgaggatatcagcccgctggtggcgatccgcgaatatattcgcctgaagctggaggtgtcccgcgatcacccccaggcctcgaagctcttctgcctcgagatgctgcagggggcgccgctgctgatgggcgaactgaccggggatctgaaagcgctggtcgacgaaaaatcggcgatagtctccggctggatcgaccgcggcaagctggcgccggtcgatccacagcatttaatctttatgatctgggctaccacccagcattacgccgacttcgccacccaggtggaggcggtcaccggcgccacgctgcaggatgcggccttttttgaacaaacggtcgataatgtccagcggatgattatcgaaggcattcgcgtccgttaattggcgggcggcagcgggcagctttgatcgccatcctcgcactgtagcagcgaggcgaggaaagactcccgctccacgctcttatcggtcatgcactggctgaccagcattggctgcatgctgccgccttcggcgccggacgcgagaaaggcgcagtcggcgtcgcggagggcgatccatgcctgctgcgcctgcttcagtaatgtttgttgtttacccaccgcccgctgcagggcctgctgccaggtgtcgttcagttttttatcggccgcctgatactgcgcggccgcgcactgattcatttcggtttgggtgttggcgctgctgcactcgtccgccagcgccgcgccgctggccagcagggccatcacggcaaataacgtgcgtttcattgttctgctcccataaaaaaggctcccgtccgggagccttaattaaacacagctgacgtcggctgtcattagctgatcgcagcgcagactgattgcccggatggcggcgcaccgcgccttatccgggctaccctttggcggtggtaggtagccccggtaagcgtagcgccaccggggagcccgttttagccgatggtcatcaggctggcgttaccgcctgccgccgcggtgttaacgctcagcgaacgctcgatatacagccgctccagcagcagattggtttcgccgcgggcgaagccctgcacggagacaatcgccccgtcgcgcgccgccacctgctcgcacagctcgcgcagctggtcggaatcgccgtggtagataaccgcgtcgaaggcctggccaggcaactgctccgctttggcaaagcgaatgcgctcgctgacctcccgcggcagtttcttcgccagatcgcgctgcagggcgctgtccggccacagtacttcacaacccaccgccagcacagccgccagctggatcagcgcatcctgttcgttatccgctacgcacagcacgcgctcgcgcggcatcagcgtcagggtgttgcgctcgccggttggccccggcagcaggcgttgggtgccgctttgcgcctgctcgctgtactgctggcacagcgcctgcagctcaggacggcccgcggcccactgctgcagcgcctgcagcggtttttccagcagcgttttcagctgggcgtccagcggacgctccgcatcctggcgggcgaaggttacgccaaccgcgtcctgcggacggctggagagcagacggtacagatacagcggaccgccggctttcggaccggtaccggacagcccttcgccgccgaacggctgaacgccgaccaccgcgccaaccatattgcggttgacgtacaggttgcccaccttggcgctgccggtgacctgggcgatggtttcgtcgatacgggtatgcacgccgagggtcaggccgtagccagaggcgttaatctgctcgaccagtttgtccagctcgttacggttatagcgcaccacgtgcagtaccgggccgaagacctcttttttcagctcgtcgaagctgtcgagctcgataagcgtcggcggcacgaaggtcccgtgacgccattcgcgggcgtcttcgctattctcgcgcaccgcctggtagacggtgcggcctttggcgcgcatcgcctgaatatggcgttcgatattctctttcgcttccgcatcgataaccggaccgatatcggtggtcaggcgccccggattgcccatccggcactcgctcatggcgccgcgcagcatggttaaggtgtgatcggcgacctcttcctgcaggcaaagcacgcgcagggcggagcagcgctgaccagcgctgtcgaacgcggaagccagcacgtcgatcactacctgctcggtgagcgccgacgaatcgacgatcatcgcgttcatcccgccggtttcggcgatcagcggcgtcgggcggccctggggatcgaggcggctggcgatattgcgctgcagcagggtggccacttcggtggagccggtgaacatcacgccgcgtacgcgctcatcggtggttagcgcggcgcccacggtctccccgcgacccggcagcagttgaataacgcccggcggcacgccggcttccagcagaatcgccacgccctgggcggcgataagcggcgtctgctcggcaggtttcgccagcacgctgttgccggccgccagcgcggcggcaatctggccggtgaagatcgccagcgggaagttccacgggctgatacagaccaccggacccagcgggcggtgagtttcattatcgaaatcgtcgcgcacctggccggcgtaatagtgcaggaagtcaacggcttcgcgcacttcagcgatggcgttgctgaaggttttacccgcctcgcgcaccaggatccccatcagggtcggcatttggctttccatcagcaccgcggcgcgctcaagaatggcggcgcgctcctgcggcggagtggcgaaccagatcggcgcattgttgatagcgctggtcagcgcctgctgcacttcagcgtcgctggcttcgcggacgtagccgacgatatctttcggctctgccgggttaaccaccggctgcatttcgccttcggccaccggctgctccagcatcggcaatgcctgccatttatgcagcgcgctgttgagcagggaagaggagagggaggccagacggtgctcgttcgccagatcgagaccggcggagttgctccggccgctgccgtagagatcgcgcggcagcgggattctcggatgcggcaggccggcctggccttcctgctgcgccagtttttctaccgcgctgaccgggtcggccaccagctcgtccagcggcagggtattgtccgcgatacggttgacgaaagaggtattggcgccgttttccagcagacggcgcaccagatacgccagcagcgtctcgtgggtgcccaccggggcgtagatccggcacggacggttcagcttgccgtcagcgaccttgcccactacctgctcgtacagcggttcgcccatgccgtgcaggcactggaactcatactggcccgggtagtagttctggcctgccagctggtagatagccgccagagtatgggcgttatgggtggcaaactgcgggtaaatcaggttcggcaccgccagcagcttcttcgcgcaggcgaggtaggagacgtcggtgtaaaccttgcgggtgtataccggatagccttcgagaccttccatctgcgcgcgtttaatttcgctatcccagtaggcgcctttcaccagacggatcatcaggcgacggcggctgcgggtggcgaggtcaatcaggtaatcaatgacaaacggacagcgcttctggtaggcctgaatcacgaagccaatcccgttccagccggccagttccggctcgaagcacagtttttccagcaggtcgagggagatctccagacggtcggcctcttcggcgtcaatattgatgccgatgtcatactggcgcgccagcagggtcagcgatttcagccgcgggtaaagctcttccatcacccggtcatactgcgcgcggctgtagcgcgggtgcagcgcggagagcttaatggagatacccggaccttcataaatgccgcggccgttggaggctttgccgatggcatgaatcgcctgctgataagaaaccatataggcctgggcgtcagcggcggtcagggcggcttcgccgagcatatcgtaggagtagcggaaccctttttcttccagcttgcgggcgttggccagcgcttcggcgatggtttccccggtgacgaactgctcgcccatcaggcgcatcgccatatccacgcctttgcggatcagcggttcgccgctcttgccgatgatgcggttcagggagcgggagaggctggtctcgttatgggtcgacaccagttttccggtgaacagcagcccccaggtggcggcgttgacgaacagcgacgggctgcgcccgatgtgcgactgccagttgccgttgctgattttgtcgcggatcagcgcatcgcgggtggctttatccggaatacgcagcagggcttccgccaggcacatcagcgccaccccttcctgtgaagagagggagaactcctgcagcaggctctgcaccatgccggcgcggccgctggcggttttctggttgcgcagtttttccgccagctgatacgccagcttgtgcgcctgttcgcccagcggctgcggcagacgggcctgctccagcagcatcggtaccgcgtcggtttccggacgtcgccaggcggcggtgatcgccgcgcggctcaccgactgcggcaggatctgctcggcgaattcgaggaacggctgatagggctcttccgttggttcgctggcgtcatcgctttcgttggcggccccggagagcagggccggcagctcaggcagcgtctcgtcgttctccagtttttccagataattaaagatggcctgcttaatcagccagtgcggcgtgcggtcaatacggctcgcggcggatttaatgcgctcgcgggttgcgtcgtcaagcttaacacccatggtggtggtgcccatgctcaaaactcctgtcatttatcgttaggcttatgcggttgcatggaaatatccactatgttgcaactttgtgcaaccttgttaattgtggcttgtgacggaagccgtgaaatggctaatttgttaaaaataacccctaaaatagcagaaatttaaccccgggctcatagggtatttgtatgcgtgagttaacacttttgtttggtgcaacctttaaaaacgtgagagagtgcaacctctaacaaattgacgttttgcgccgtcggtttttcgtgtaaatgctgtgttaaatcgtttgtgaaaaaccgaagcttccgtcaggatacggtcgcccaattaaacaatgcgccattaccccgttccggtagtggaaaaaaacgacgaagttggacgctgtcgataaaaattctggagactttgcatggctattagcacaccgatgctggtgacatttattgtttatatttttggtatggtattgatagggtttattgcctggcgttcgaccaaaaacttcgatgattatattctcgggggaaggagtctggggccatttgtgaccgcgctttccgcaggggcgtcggatatgagcggctggctgctgatgggcctgccaggggcgatttttctctccgggatttccgaaagctggatcgccattggcttaacgctgggggcgtggattaactggaagctggtggccggtcgcctgcgcgtgcataccgaggtgaataataacgccctgacgctgcccgattattttaccggccgttttgaagataaaagccgggtgctgagaattatttcggcgctggttattctgctgttctttaccatctattgcgcttcaggaattgtcgcgggggcgcgtctgtttgaaagcaccttcggcatgagttatgaaaccgcactgtgggccggggcggcggcgacgattatctataccttcgtcggcggcttcctcgcggttagctggaccgataccgtgcaggccagcctgatgatttttgcgctgatcctcaccccggtgatcgtgattatttccgtcggcggctttggcgattcgctggaagtgattaagcagaagagcatcgaaaatatcgacatgctgaaagggctgaacttcgtggcgattatctcgctgatgggctgggggctgggttatttcggtcagccgcatattctggcgcgctttatggcggcggattcgcaccacagcatcgttcacgcacgtcgcattagtatgacctggatgatcctctgcctcggcggggcggtggccgtcggcttctttggcatcgcctacttcaataacaacccgagcctggcgggcgcggttaaccagaacgccgagcgcgtgtttatcgaactggcgcaaatcctgtttaacccgtggattgccgggatcctgctgtcggcgattctggcggcggtgatgtccaccctgagctgtcagctgctggtctgctcgagcgcaattaccgaagacctgtataaagccttcctgcgtaaaaacgccggtcagaaagagctggtgtgggtgggccgtatgatggtgctggtggttgccctggtggccattgccctggcggccaatccggaaaaccgcgtgctgggtctggtgagctacgcctgggctggcttcggcgccgcctttggcccggtggtcctgttctcggtaatgtggtcgcgcatgacccgtaacggcgcgctggccgggatggtgattggcgccctgaccgtgatcgtctggaagcagtttggctggctgggcctgtatgaaatcattccgggttttgtcttcggcagcatcgggattgtggtctttagcctgctggataaagcgccgtcggccagcatgcagcagcgctttgccgaagcggatgcccactaccatacgccgccgccggtacgcgccacggctgagtaagatcatctaatgctcacgagcccgccgctggcgggctttttattgcctggtgccgtgccggaatattataacccttgctaattatctgaaaatccgctgatatttcctgactaataacaatgaggatagcaaagatgacgttcagacagggtgcaatggcgctggtgctggcagggttactcagcggctgcgtggcgggtggaagttcatcgaccagcgcgccgaagcccggcgtctgcccggcggataagtccatggtgcaaaccacgctttacttcggtctgagccgcccggcggggaaagacatcaccgctgaagagtggcaacagtttgtcgaccgtgacgtcacgccgcgctttcgcgacgggctgacggtgtttgatgcccacggccagtggcttggccagaatggtcaggtggtgcgggagcagagcaaggcgctgatggtgatccatgggcatgacgcgcagagcgaggccggtattgaggctctgcgccagggctataaatcacgcttcgcgcaggagtcggtgatgcgtgtcgaccagccggtctgcgtgcagttctgagtaaacggcgggggcagccccgccgtttgttttacagcaccagcccggcgaagctggcggaaagcaggcttaccagcgtggcgctatacaccagccgcaggccgaagcgggagacgatattgccctgcggttcattcaggcctttgatcgccccggcgataatgccgatcgaggcaaagttggcaaacgacaccaggaataccgagagaatgccgagcccgcgaggagtcatgctggcggcaatcttttgcagctcaatcatcgccacaaattcgttagcgaccagtttggtggccatgatgctgccggcgtttagcgcatcgctcagcgggatgccgataagccacgccagcggataaaagacgtagccgaggatctgctggaagctgagaccaaacagggtggcgaacagcgcgttaatggcgctgatcagggcgataaaaccgatcagcatcgccagaataatcatcgccactttaaagccggccagaatatattccccgagcatttcaaagaaactctgcgattcatgcagcttctcgagttttatttcctgctcgctgcccggccgcgtcgggttaattaccgacagcacgataaaggtgctgaacatattgaggatcagcgctgcgacgacatatttggcgtccagcatggtcatataggcgccgacaatcgacagcgatacggtcgacatggccgtcgccgccatagtgaacagtcgccgtgaggagaggtcgcccagtacgcccttgtaggcaatgaagttctccgactggccgaggatcagcgagctgacggcgttgaaagattccagcttacccatgccgtttactttcgacagcagggtgccaatcacgcgaataaaaatcggcaggatccgccagtgctggagaataccaatcagcgcggaaataaacacaatcggacacaggacgcccaggaaaataaaggctaagcctttttcgctcatgccgccaaagacgaaattggtcccttcggcggcaaagcctaacagcgaagcaaaaaagccggaaatattttttaccagccacaggccgctttcggcgtgcaggaaaaagaaagcgagcgctatttcgataataatcaactggagaatataacgaatacgaattttttgtctgtcgtagctgacaagccaggccagggcgaggatcaccgccagcgccagcaggaaatgaaaaaatgcagtcatgttgttcttttcgcaagtcaataaggccgccatttagccatagccgctacggcgggtaaatatctggcgtaaaaaatcctttgcttattctttcccttcataacaggcgaatattttcataagtcattatttgtcagcgatttatttacaactgatcatcattctctgcacatttcgcttgtgtttctgagcattgtaatgataatcactatcataaatattacctgtttttgcattcgttgacggtgctttacatttaagggtattggcatgtttgtcccatttctcattatgttacgcgaaggcctggaggcggcgctgattgtcagcctgatcgccagctatctgaaacgcacccagcgcggcaactggattggcgtgatgtggattggcgtgatcctcgcggcggcgctgtgtcttggcttaggcatctttatcaacgaaaccaccggtgaatttcctcagcgtgaacaggagctgttcgaagggatcgtcgcggtcattgcggtggtgatcctgacgtggatggtcttctggatgcgcaatgtctcacgcaacgtcaagcagcagctggagcaggccgtggacaaggcgctgcagcgcggtaatcaccacggctgggcgctggtgatgatggtctttttcgcggtcgcccgtgaggggctggagtcggtcttctttctgctggcggccttccagcaggatgtcggcatctggccgccgctgggggcgctgctgggtctggccaccgctatcgtgctgggcttcctgatctactggggcggtatccgccttaaccttggcgtgttcttcaaatggaccagcctgtttattctgctggtggccgctggcctggccgcgggggcgatccgcgccttccacgaggcgggcctgtggaacctgttccaggataccgccttcgatctgagcaacgtgctgtcgacgcatacgctgttcggcacgctgctggaagggatcttcggctatcaggagacgccgagcgtcagcgaagtggctgtctatctgctttatctgatcccggcgctggtgctgtttgccctgccgccgcggaataataccactgcctcgcgggctgcctgaccgggcgctgcgagcttataagcgacactctacttaccgaaagggatgatcatgatgattcattttcgccgtaatgcgctgcgggtgaccgtggccgcgctgctcagctctgcattcggtgctcaggctgcggatatcccgcaggtcaaagtcaccgtcaacgacaagcagtgcgagccgatgcaggtgaccgttaacgcgggtaaaacccagtttattattcagaaccacagccagaaagcgctggagtgggagattctgaaaggggtgatggtggtggaagagcgcgaaaacatcgcgccgggctttactcagaagctcaccgcgaacctgcagccgggcgaatatgacatgacctgtggcctgctcaccaacccgaaaggcaaactgatcgtcaccggcgccgccaccaaagacgcggcgaaagcggatgcggtgctgagcctcggcgacgcgatcaccgcctataaagcctatgtgacggcggaaaccgcgcagctggttagcggcaccaaagcctttaccgacgcggtgaaagccggcgatatcgaaaaagcgaaagcgctgtacgccccgacgcgtcagcattacgagcgcatcgagcccattgccgagctgttctctgaccttgacggcagcatcgacgcccgcgaagacgacttcgagaaaaaagcggaagatccgaaatttaccggtttccaccgtctggaaaaagcgctgtttggcgataacagcgtcaaagggatggaaaaatatgccgatcagctgaacagcgatgtgctggagctgcaaaagcgtatcagcgagctggcgttcccgccgtcaaaagtcgtgggcggcgcggcaggattaattgaggaagtcgcggccagcaagatcagcggtgaagaagatcgctacagccataccgatctgtgggacttccaggccaacattgacggcgcgcagaaaattgtcgacctgctgcgcccgcagctgcaaaaagagaacagcgcgctgctggcgaaagtggacgccaactttaagaaagtggacagcatcctcagcaaatatcgcaccaaagacggcttcgagacctacgataagctgaccaccgccgaccgtaatgcgctgaaagggccgatcaccaccctggcggaagatctggctcagctgcgcgggatcctggggctggactaagtcgatggcacagcagaaaccccacgacgtgaacgagccgtcacgtcgtcgcttactgaaagggatcggcgcgcttggcggcgcgctggccatcaccggcggctgcccggtagcgcatgcggcaaaagcggaaagttccccggggacgctcacacccgacgcgcgccaggaaaagcagccattctatggccggcatcaggcgggcattctgacgccgcagcaggcttcgatgatgctggtggccttcgatgtgctggcggctgataaagccgacctcgagcggctgtttcgactgctgacccagcgtatcgcctttttaacccagggcggcccggcgccggacacgccgaatccgcggctgccgccgatggattccggcatcctggggccgtggattgcgccagataacctgaccatcaccgtctcggtcggccattcgctatttgatgagcgctttggcctggcggataaagcaccgaaaaagctgcagccgatgacccgcttccccaacgattcgctggatgccgcgctgtgccatggcgacctgctgctgcagatctgcgccaatactcaggatacggtgatccacgccctgcgtgatgtcatcaaacatacgccggatctgctgagcgtgcgctggaagcgggaagggtttatctccgacagcgcggcgcgtagcaaaggcaaagagacccccatcaacctgttggggtttaaggacggcaccgctaacccggcgagccacgacagcgcgctgatggataaggtagtgtgggtgacagccgatcaggacgagccggcctggaccgtgggcggcagctatcaggcggcgcgcatcatccagtttcacgtggagttctgggatcggacgccgctcaaggagcagcagacgatctttggtcgcgacaagcacaccggtgcgccgctggggatgaaaaacgaacacgataccccggattacagtaaagatcctaacggcgaagtcattgcgctggatagccatattcgtctggccaatccccgcacgccggaaacccagtccagcctgatgatgcgccgcggctacagctattcgctgggggttactaacgccggacaactggatatggggctgttattcgtttgctatcagcacgatctggaaaagggttttctgacggtgcagaaacggcttaacggcgaggcgctggaggagtatgtcaaaccgatcggcgggggctacttctttgttttacccggcgtagttgatgaaaaacactatctgggagagtcgctgctgcaggcctgataccgaccctgcccgtaagggcagggcgttttctgctgtttttctcatttttcttatatttcctgccatgtgttatatttctgtaatacaaatgaccgatagtctcctacacttgcttaagaactatttgttgcgtcattgtgaaaaataagttgcattaagaatcttttttgatgtacttattacatacgcggtagttcccggcagtgtgacgtttcactatggagatcgcgaatggtaaggtcccgtaccggacaacgtaaaatctcagaccgtactcttcagcacggaagccccgcttccggcagcgattttcttactctttctctctccgcttcgcattattacaaccttggcagggtacgcggtgcgcgtagccgcgactcgttgtcagttctaccggcaagcaatggcttacaaggaagccaaacctcaatcgttcgtgcgcatagtcgcgtcgatgttgacgcgtgtgatgtaaaccaacaacgcaaggtgctatccatgggaagacaaaaagcagtgatcaaagctcgtcgtgaagcaaaacgtgtgctgagacgggattcacgcagccataagcagcgtgaagaagaatcggtcacatcgcttgtgcaaatgagtggcgtagaagcaattggcatggcgcgggacagccgtgatacttccccaattgaggcgcgcaatgaggctcaggcgcattatttgaatgccatcgacaataagcagctgattttcgctaccggcgaagctggatgcggcaagacctggatcagtgcggcgaaggcagctgaagccctgatccataaggatgtggacagaattattgttacccgtcccgttctgcaggccgacgaagatctcggcttcttaccgggagatatcgccgagaagttcgctccctatttccgaccggtttacgatgtgctggtgaaaaggctgggggcttcctttatgcagtactgcctgcgtccggaaatcggcaaggtggaaatcgcgccgttcgcctatatgcgcggacgtacctttgaaaatgcggtggtgattctggacgaggcccagaacgtgaccgcagcgcaaatgaagatgtttttaacccgcctcggggagaacgtgacggtcatcgtcaatggcgatatcacccagtgcgacttgccctctggcgtgagatctggcctgagcgatgcgctggcgcgttttgaggaagacgagatgatcggcatcgtgcgtttcaccaccgatgactgcgtgcgctcggccctctgccagcggacgctgaaagcctattattaatcgtcatactgtgagcaaggcccgggctagcccgggctttgttgtttttgggcatcctcccggcggcgctgcgcttagccgggctacctggcgggtacggtctggtagcccgggagaggcattgctgccgaccccggggatgtctgcggtgccacatgcgaaaaaaaagcccgtacatgcgtacgagctcttcttaaaatatggcggtgagggggggattgactcgcttcgctcgccgttactcggcccatccctgggcctcgcccctgcggggccaacgcaggcgttgttcaaaaacgctcccggcgtttttgtcggggcagcccgctcgcaggctcgcagtctgtccaactggctgcgccagttgtcgaaccccggtcgggggttctcatccccccggcgggtgccacatgcgaaaaaaaagcccgtacatgcgtacgagctcttcttaaaatatggcggtgaggggggattgactcgcttcgctcgcccctgcggggcagcccgcttactgcgtgcgcggtctgtccaactggcgttgccagttgtcgaaccctggtcgggggttctcatcccccccagcgggtgccacatgcgaaaaaaaagcccgtacatgcgtacgagctcttcttaaaatatggcggtgaggggggattgactcgcttcgctcgcccctgcggggcagcccgcttactgcgtgcgcggtctgtccaactggctgcgccagttgtcgaaccccggtcgggggttctcatccccccctgcggagaatataaaagaaaagagcccgtacttgcgtacaggctctcatctcgaatatggcggtgagggggggattcgaacccccgatacgttgccgtatacacactttccaggcgtgctccttcagccactcggacacctcaccatattgtcttgctgctcaccttgggtgggcaacggggcgctactatagggagttgcgttaaaacggtcaagcatattttcttctttctttgccgttcgctcacgcaatgaacaatgccccgctgcggctcagcggggcgggcgttttagcgctgggaatccagctgttcgttattcttcacgacgtcctgcgctttgctgtagctttcgatcagcagctggtaggccgggaagactttggtgtacacctccgcccattctgcggcgtccgggcgattccaggtgcgctgcagctcagaggcgacggcggcggtatccattggcactacgccggcctgtaccacgcgagccagggtgatctcctgcgccattttgctgtaggtgccggaagcgtcaatcacggcaaacactttataaccgtcggcgacagcggcgatagccgggaaggccatgcagacgctggtgatggtcccggcgataatcagcgttttacgaccggtcgctttcaccgcggcgacgaattccgggttatcccaggcgttaatctcacctttacgggcgatgtatttcgcatgcggcgcgttttcatgaatctccgggatcagcggaccgttcggcccctgcggcacggaggcggtcgtgatcaccgggatcccggcaagcgacgccatcttggccagcgcggcggcgcgagcgcgcagctctggcatcggcatatcgccgacggtctggaacagaccgctctgatggtcaatcaacagcattgcggtatcgttaacatcaatcaccggacgagcaccgttaaagttagcgggagtagacatagtattcacctcaatcagttagatttggccaaagcggccgctgttaaaatcgcgtacagcttctgcgatctgcgttttgttattcatgacaaacgggccatagcccacaatcggctcctgtagcggttctccggccatcagcagaacttttgccggggcggtcgcctccagatgcactgcgtcacctgcttggctcaggacggccagctggccttcgcgagcagattcggaaccgttaatgatcacttccccttccagcaccaccagcgcggtactccagccctccggttggcgcagcgtgaggtcgtgcccctgattcagctgcagatcccacacgttaagcggtgagaaggtatgggccgggccgctgacgtcgtcatactggccggcaataacccgaacctgtccggcgccgttcgccagcgccacggtggggatcgtcccagcggtaatgctctggtagccgggggtcgccattttgtctttcgcgggcaggttgacccacagctggatcatcttcagctcgccgccgctgcgggtgaaggcctccgagtggaactcttcgtgcaggatcccggcgcccgccgtcatccactgcacgtcgcctggaccaatcaccccgccgcgtccggtggagtcgcgatgctctacttcaccggcgtagacgatggtgacggtttcaaatccgcgatgcggatgctcaccgacgccgcgtttttcgctgcccgccgggaaggtgtacggcccggcatagtcgagcagtaagaaggggctcagctgctggccgtgcgtctgataggaaaacatcgagcgaaccgggaagccgtcgcctacccaatgctgcgcaggcgcggtgtagactcctgtgatctgtttcatggctttctcctgtgtatcggtatctgatgtaaataagcttatatccgggacgacgtatgcggtagtgagcaaaaatgacctatactgttccaaaaatggaacaatggaggaaggatgcaggatctcaatgacttcgcctggtttgtccaggtggtagaccatggcggtttcgccgcggcggggcgagcgcttgaccagccgaaatccaaactcagccgccgcattgcgcaactcgaggagcggttgggcgtgcgtttgattcagcgaaccacccgtcagttcgcggtcaccgaggtcgggcagaccttttatcagcattgcaaagcgatgctgattgaggccgaggcggcgcagcaggcggtcgagacgctgcgcgccgagccgcgcggtagcgtcaggatcacctgtccggtcaccttgctgcatgtccatatcggaccgatgctggcgcgatttatggcgcgctatcctggggtaacgctgcatcttgaggcgaccaaccgccgggtggatgtggtcggggagggcattgatgtggcgatccgcgtccgtccccggcccatcgaggatagcgacctggtgatgcgcgtgctggcggaccgcgggcaccggctggtggccagcccggatctcatttcccggctcggacgtccgcaggcgccgtccgagctgagcgcctggccgggcctcagcctgggtgcgaacaagcatcagcataaatggcagctcaccgggcccgggggagcgagagcggaagtgtatttcacgccgcgaatggtgaccaccgatatgctggcgctgcgcgaggcggcgatggccggcgtaggcgtggtgcagcttcctttattaatggtgcgcgatcagctggcgtcaggtgaattagaggtggttctggacgagtggcagccgcggcgggaagtgatccatgcggtatttgcctcacggcgcgggctgctgccctccgtcagggcgctggtggactacctcagtgaagagtatcagcggatggaggaagattgatgggtaggcagaggttttttgtcggaactcatatgtgaaaagcgtccgtactttttcacgcactcttcgcaatcgcgtaggctcgtgaaagattgctcactgtgtgagtcgtttgccgcttgagagcgttggctgttataagcaacctctggttttttcgatacatcgttttactatgaccgtctggtattatttaagcaattttgccataacgtcaaaaaacattggcagatcatccttgaatgagaaggtcgtgtttattgcctgacgagcgattaaaccgtcaataagggcaaaaataatgatcgtgatttcttcaaggttaatatcacggcgaaactctccggcagcgataccctcctggatgagccgcgcgaagcttttccgcatgatgtcatcactggagatatacgtttttcgcagttctggattacgcgcagactcagccatgatttcaacccaaagttgatgcgtgatagggtaaccgatctcgctaatacaggacgtgacttgtgcacaaaggcgatcaaaataagagcctgcataggtcgcattatgggcagtcagcgcggagttctgttcttccagtacaatagccttaacaagctcatccttacttttgaaatacgtatacattgctccttgactaattcctgcccgggtagagatttcacgtacgcttgtcgcactaaagcctttttccgcaaagcaggcagcagcagccgtaatcaacttatggtaggtttcggttttttttaacatatcggcttcttggtaaattcggtgtccagactttaacgcgcttttatgcaaggagccagagctaaactctgtcgtctggctcctggatttcgtcttactttagaaggggtaattcactgagcatgttcttgagattcagcatgtcccagggcaaatgttcagcgattgtcaggccaacggggactgcttttgtcgtcgctgccgctatcagattgagtacatcctcaatcgtcagtttgccttcagcaacgtcgccaaaatcgtgttttccgcgccccggttttgcaaaaagaatggagcggaacagagatgggtcgagtacgtccagatcgatatggatcgccagatacgcaatcttttctttcgctatccactccaggacttcatctgcaccgcttttaacctgttcaggtgctagcgtcgtaatgttatggcgagtgaggtattcagcttcataaggaagtggcgcgtggataccggcaatcattatttttgacggattaagtttggtttttacatgggcaactaaatcgttatcacccgtacccattagcgcaccaagcacatgggcatgcgcgtttggatattgttcagccgtctgcacgtcaggatgcgagtcaatccagagcacaccgagtttgtctccgaacttatcgagcaggtgggcgaaaggcgccagcgaaaccaggcagtctccgcctaaaatgacaatgctattgggatcatgtttttcaatcagtgcggcagcattattgagttgcctgatgagggatggcttagccgtgatgtcattaatccttggcaatggctctgttgttggtaactcaacaggaacgatctcaacgggcccttttgcttcaggagagagaaacgagaggagctgcgagccaagatagtagggaggattgttaccgccttgccattgagggaatataagtcgcagtgttttgctagtcattggtaccttctgtgttgtcatgcgctaaagtgaatgaacgttcattcacttttacattgaattacggtcgatacgcaagtaacaaagcacttttcgttaatgcataacgtacaccatccggagcgatatgattttcgttatgccgggtggctcaaagcggaagaggggatagtgttggcgaacatcttcgctgcgctgttaatcgtgtgaagaagagtctggctttgacaatactgcgtaatgtctgtggtcagttgtcgaaccccggtcgggggttctcatccccccggcgggtgccacatgcgaaaaaaaagcccgtacttgcgtacgagctcttcttaaaatatggcggtgagggggggattgactcgcttcgctcgcccctgcggggcagcccgcttactgcgtgcgcggtctgtccaactggctgcgccagttgtcgaacccctgtcgggggttctcatccccccctgtggagaatataaaagaaaagagcccgtactttcgtacaggctctcatctcgaatatggcggtgagggggggattcgaacccccgatacgttgccgtatacacactttccaggcgtgctccttcagccactcggacacctcaccatattgtctttcccgttgttgtcgggaacgggcgctaatgtagggaaatacgtatcgcccgtcaatcaactttttgcaaaaaaagcgcgtttagacaaacttcgagcaacttgctccttaaacgtgcgaaatccgttttttttgtcgccagtagcttttcccttttcgctcgggggaaatttgttatgctggcaaaccaatagaaaacaatgagtaaaattagacgccagcgtcaatcggccaaaggcgtctgctatcaggagcccctatggagattattttttaccatccgacctttgatacccaatactggatctgtgagctggaaaagcagttacccggcgcgcgggtgcgcgagtggaaagcgggcgataaccggccggcggactatgccctggtctggcatccgccggtagagatgctgcagggccgggcgctgaaggccgtgttcgccctcggggcaggggtggactctattctcagcaagctgcgcgaccatccggatatgctgccgctgtcgattccgctgtttcgtctcgaagataccggtatgggacggcagatgcaggagtatgccgttagccaggtgctccactggttccgccgctttgatgactatcaggcgctgaagctggcttcccgctggcagccgctgccagagtaccgcgccgacgaattcaccgtcgggattatgggcgccggcgtgctgggggcgaaggttgcggaaagtctgcaaccctgggggttcccgcttcgcgtctggagccgtagccgcaaatcctggccgcaggtgcagagcttcgccggccaggccgagctgggcgaattcatgcagggcactcgcgtgctgatcaacctgctgccgaataccgccgaaaccgccggcattattaaccagacgctgctggcgcagttgcctgatgagagctatgtcctcaaccttgctcgcggcgtgcatgtcgttgaagaggatctgctggcggcgctgaacagcggtaagctcaaaggggcgatgctcgatgtcttcagtcgcgaaccgctgccgcaggagagcccgctatgggcgcatccgcgggtggccatgaccccccatgtggcggcagtgacccgtccaatggaagctatcacctacattgcggagaccattagccggcttgagcgaggggagccggtaagcggtcaggtcgaccgccagcgcggttattaagacgagagaaccccgccacggcggggtttttgctaatcaatagcccggtttcctgctattcttgcggcaaacagaagaggagaatgtgatgtatcccgttgacctgcacatgcataccgtcgccagcacccatgcctacagcaccctgcacgattatattgcggaagcaaagcgtaaagggatcaaactcttcgccatcaccgaccacggcccggacatggcggatgctccgcactactggcacttcgttaatatgcgcatctggccccgcctggtagacggggtggggatcctgcgcggtattgagtcgaatattaaaaatattgaaggcgagatcgactgttccggaccgatgttgacttccctcgatctgatcatcgccggatttcatgagccggtgtttccgccgcaggatcgtgacacccatacacaggcgatgatagccgcgatggccagcggtaaagtgcatatgattagccatccgggtaatccgaaattcccggtggatatcccggccattgccgaagcggcggctcgctaccaggtggcgctggagattaataactcctcgttcgtatcatcgcgcatgggcagtgaagacaactgccgggccatcgccgccgcagtgcgtgatgccgggggatgggtggcgctgggctcggactctcacaccgcctttaccctcggggaatttaccgaatgccgcaagatccttgatgcggtcgatttcccggaggagaggatcctcaacgtttctccgcgtcgcctgcttaacttcctcgagtcgcggggcatgccggcgatcccggaatttgctgacctttaatttgtataactggaataactgaatgaacgagttttcaatcctctgccgcgtgctgggttcgctgtattaccgtcaaccgcaggacccgctgctggtgccgctgtttaccctgatccgcgagggcaaactggccgccagctggccgcttgagcaggacgagctgctggcgcgtctgcagaaaagctgtgaaatgcaatccctggcgacggactataatgcgctgttcgtcggtgaagcctgcagcgtcccgccgtaccgtagcgcgtgggtggagggttcctcggaagcggaagttcgggcttttctgagcgaacacggcatcccgacaggggaaggtccggcggatcatctcggctcgctgctgctggccgcctcctggctggaggatcatgccgcagaagaccagagcgagacgctggagctcctgtttgccgactatatcctgccgtggtgcgggacgatgctggggaaagtcgaagcccatgcgcacacgccgttctggcgcaccatggcgccgttgacccgcgacgccatcgccgcgatgtgggacgagctgcaggaagaagatgagcaataatatgtgatgcaaatcaccatatgaatgcaactgaaagaaagttcattcatatactgtgttttagatcgcattcttccggcgcgtatctgctaggatacgcgccatgaacatactcttcgcaatcgcattaacgacaggcatcctctccgggatttgggggtgggtggcggtcgctctcggcctgctgagctgggccggattcctcggctgtacggcctatttcgcctgcccgcagggcggcttgaaagggctggccatctcgtcctgcacggtgatgagcggcgtggcctgggcgttagtgattatccacggtagcgcgctggcgccacaggtgcagatcctcagctatatgatgaccggtgtggtcgccttcctgatgtgcattcaggcgcgacggacgctactgtcgtttgtcccgggcacctttatcggcgcctgcgcgaccttcgcggcagacggcgactggcgtctggtgatcccttccctggcgctgggtctggtctttggctatgccatgaaaaatagtggcctgtggctggcggcccgtgcggataagcataaatcgttcgccaacgacaacgcctgatcggcgggacgactaaaaaacaggaccttacgggtcctgtttttttatcttctcgtcaccggacaaagcgataatcttgctcccgcaggcgagaatgccctagtatcggcagaaagccgtatccacacgctatgccgacaggaggagaaatggctgttaaacctgaggtaattctcggcgatattacgacacttgatgtcgatgtgattgttaatgcggcaaatccctcgctgctgggtggtggcggagtagacggggccatccaccgggcggccggtcccgcgctgctggcggcttgcaagcaggtgctgcagcagcagggcgaatgccctcccgggcatgcggtaattactattgccggcaatctgccggccagcgcggtgatccacaccgtgggcccggtctggcacggcggtgaccgcatggaggcgcaaaccctggccgatgcttacaaaaacagtctgcagttggcctcggcaaacaactatcgctccattgcgtttccggcgataagcaccggcgtgtatggctatccgaaagaggaagcggcggcgatcgccgtgcgcaccgtcaccgcgtttctcactcgctataaccctcttgagcgcgtcctgttcgtctgttttgacgaggaaacggcggctatctatcgccgcctgctggcgtcatacccctgattcaacagaataggctatgataaccgccagtcttgacgggaatgatgggtagcaggagggagcagggtgtcagaaggaaaagtccagcagaaacagcaggcgcgccgcgcggagatcgttgtcgctgcgcaaaaatgtttcgctgaaaaggggctgcacggcgcttccgtcgccgatatcgcccgggaagcgggcctgagcgtcggtcagctatatcgcatttttgccagcaaggaagcgatcatcgaagcgattgttagcgaaatcgtcaacgccagagtcggggagatgatcgatgagaaccacaatctggcgcgtaaagcggcggttttggctggcaggatcccgacgtcggcagccaccaaaagcgataattatctgctgatggagatcaatgccgaggcctcgcgtaacccccgcttgcgtgagatcctgatgcaggcagatcggcggttgaaagaggagggcggtcgcctgtcgcagcgctaccatcccgggctcagcgatgcgcgacgcaatgccgcatcagagctcatcgccgttctgacagagggggcagcctaccgctgtgagctgagcgcctccaccccggtcgataaggcagatttagaagccctgtacaatatgattttcgaccggctttttgacgagcaggcataatacggcacgcctggcgtgccgcacaggctaatggttagctggccgaggctggggttttggccggtttgttcatcggttttccggagaacaggaaacgcagcagcggaatgcgcagatgaatttcatacagaatcagggcaatacccaccacaaaaaccaacccgccaataaagcctaaggtattggacttaatgaccggggtgatccacgccccgtacagcagcgtcagcggatggtgcaccaggtaaataaacagcgaagcattgacgaaataggttacgcgcgccgactggaagttcagcaggcgatggccgagcgaaaagaccacattgaccatccacagcccaagcaccatggtgatcaccgattccgtttcatacatccagccgtcgccggagccgtactgctggttcagccggtaggcgataaatcccagcagcgccgctgcgcagcaccatggtgacggggtggtaaacatcgccttcagacgcggattaataaaggtctgcgcccccagcacaaagaagggaagatagaacagcgtctgcatcaccacaaagttaaacagaccattgctaagcagcggcgggtaaatcaggaacagcgatcggcggatcagcgcgtaaagcacccccagcgcaaggaaaatcatcgttagctggcccatagtgacagtgtcaccaaaggctgaggcgccccctgccgggcggcgcgtcagccatttaaacagcaccacgcccagcgaggtcagcaccaccagcaccagtaaaaaccacaggtgggaaataagctcccacgccagggtgttaaatttgtcgtacccggaaagggtgtgccagttttccgccttgccgttgacgtactgcagcataataaactgcggcagcgtcagcagtgggatagcggtcagcatcggaataccgacccgttcgacgcgcactttccaccactttttcaacgggtagcgcaggaacagcatgtaggagaaatagccggagatgacgaaaaagacctgcatccggaaggcatggatgaagtcattaaacagcgtcaaccaccacgagggctcagcgctgttgacatgccagctgtggctggaatagatcagcgaaatgtggaaagggatccccagcagcatcagccaggcgcggatgctgtcgaagaaatattcacgctgtaccggagtattattcatacgattcacgacaatctcagataattcgtcttatcactcaagatgataacgcttacattatcagcaaccctacatgaactcggggtacctgtctccaggataagcacgcaaagtgcaaacgggatagcgaactgtttattccctgcgccgctacgctgaacaaagcagggattatgttgtcggattgcctgagtttccattaaaatagatcggatcgatttaagcacacaaagggggaagtgcttacttatatgaaacataaaccacagatgatgaaaatgcgttggttaagcgcagccgtaatgttgtccctgtgtacttcatctgcatgggcatttagcattgatgacgttgcaaaagaggccaaaacgttagccgggaaaggctatgaagcgccgaagagtaacctgccctccgctttccgcgacatgaaatacgcggattaccagcaaattcagtttaatcacgataaagcttactggaataaccagaaaaccccattcaagcttgaattttaccatcagggtatgtacttcgacacgccggtcaccatcaatgaagtgacggccaccagcgtgcgcaaaattaaatatagcccggactattttaactttggtaacgttcagcacgataaagacacggtgaaagacctcggtttcgccggcttcaaagtactgtatccgatcaatagcaaagataagaacgatgagatcgtcagcatgctcggtgccagctacttccgcgtgctgggtcagggtcaggtttacggcctgtccgcgcgcggcctggctatcgataccgcgctgccgtccggcgaagagttcccgcgttttcgcgagttctggatcgagcgtcctaaagcctccgacaaacgtctgactatctatgcgctgctggactccccgcgggcaaccggcgcttatcgctttgtcatcatgccgggacgcgacaccgtggtagatgtccagtccaaagtttacctgcgtgacaaagtgggcaaactgggcgtggcgccgctgaccagcatgttcctgttcggttccaaccagccttctccggcgcttaactatcgtccggcgctacacgactccaatggtctgtcgatcctggccggtaacggcgagtggatctggcgtccgctgaacaacccgaaacaccttgccgttagcagctatgcgatggaaaacccgcaagggttcggcctgctgcagcgcggccgtcagttctcgcgcttcgaggatctcgacgatcgttatgacctgcgtccgagcgcctggatcaccccgaaaggggagtggggcaaagggaaaatcgaactggttgaaatcccgaccaacgatgaaaccaacgataacatcgtgacttactggacgccggatcagctgccggagccgggcaaggagatgaacttcaagtacaccatcaccttcagccgcgatgaagacaagctgcatgcgccggataacgcttacgttatgcagacccgccgctctaccggcgacgtgaagcagtcgaacctgatccgccagccggacggcaccattgctttcattgtcgacttcaccggcgccgatatgaaaaaactgccggcggataccccggtcgccgcccaggcgagtaccggcgataacgctgaaatcgttgaaaataccgtgcgttacaatccggtgaccaaaggctggcgaatgatcctgcgtttgaaggtgaaagatccgaagaaaacgacggaaatgcgcgccgcgctggttaacggtgatgacacgttgagcgaaacctggagctatcagctgcctgccaatgaataagataacaaagtacattgacgcattgccgctgtcggacgccgagaaatcggcgctgccggacaccagcctgcaggccgttcatcaggccctggatgacgaccatcagaccttcgcccgcgaagacgactccccgctggggtcggtcaaggcacggctggcgcatagctggccggattcgctgtctggcgatcagctggtgaaggatgatgaaggccgtactcagctgcatgcgatgcctaaagccaagcgctcctcaatgatcccggacccgtggcgtaccaacccggtcggccgcttctgggaccgtctgcgcggacgcgatgtcacgccgcgctatctctcccgtctgacgcaagaagagcgcgagagtgagcaaaaatggcgtaccgtcggcaccattcgtcgctatatcctgctgctgctgacgctgtcgcagaccgtagtggccacctggtatatgaaaaccattctgccttatcagggctgggcgctgatcaacccggccgacatggtggggcagaacctgtggatctcgttcatgcagcttctgccgtacgtgttgcagagcggcattctgatcctcttcgcggtgctgttctgctgggtttccgccggcttctggaccgcgttaatgggcttcctgcagctattgatcggccgcgataagtacagtatttccgcctcgacggtcggtgacgaaccgttgaacccggcgcaccgtacggcgctgataatgccgatctgtaacgaagacgttgaccgcgttttcgccggcctgcgggcgacctgggagtcggtgaaagcgaccggtaacgccgctcatttcgacgtctatatcctcagcgatagctataaccccgatatctgtgtggctgagcaaaaggcgtggatggagctgattgccgaagtgcagggcgaagggcagatcttctaccgccgccgtcgtcgtcgagtgaagcgtaagagcggcaacatcgatgacttctgccgccgctggggcagccagtatagctatatggtggtgctggacgctgactcggtgatgaccggtgagtgtctgagcagcctggtgcgcctgatggaagcgaacccgaatgccgggatcattcagtcttccccgcgcgcctcgggcatggacacgctgtatgcgcgttgccagcagtttgccacccgggtgtacggtccgctgtttacggcgggtctgcacttctggcagttgggggagtcccactactggggccacaacgccataatccgcgtgaagccgttcattgagcactgcgcgctggcgccgctgccgggcgagggcaactttgccgggtcgatcctgtcgcacgacttcgtcgaagccgcgctgatgcgccgtgccggctggggggtgtggattgcctacgatctgccgggctcctatgaggagctgccgccgaacctgctggacgagctgaaacgcgaccgtcgctggtgtcagggcaacctgatgaacttccgcctgttcctagtcagagggatgcacccggttcaccgggcggtgttccttaccggcgtgatgtcctacctgtcggcgccgctgtggtttatgttccttgccctgtcgacggcgttgcaggtggtgcatgccctgaccgagccgcagtacttcctgcagccgcgtcagctgttcccggtgtggccgcagtggcggcctgagctggccatcgcgctgttcgcctcgaccatggtgctgctgttcctgccgaagctgctgagtattattctggtgtggtgtaaagggccgaaagagtacggcggatttttccgcgtcacgctttcactgctgctggaggtcctgttctcggtcctgctggcgccggtccgtatgctgttccacaccgtcttcgtggtcagcgccttcctcggctgggaggtggtatggaattcgccgcagcgtgatgatgactccacgccgtggggggaagcctttatgcgccacggctcgcagctgctgctggggctggtgtgggcggtcgggatggcatggctggatctgcgcttcctgttctggctagcgccgattgttgtctcgctgatcctctcgccgttcgtgtcggcgatttccagccgggcgacagtgggcctgcgcaccaagcgctggaagctgttcctgatcccggaagagtattcgccgccgcaggtgctcaaggataccgatgcgtacctgacgatgaaccgtcagcgttcgctggacgatggctttatgcacgcggtgtttaatccgtcgtttaacgccctcgccaccgcaatggccactgcgcgccaccgtcagggtcatatcctggagatcgcccgcgagcgccatgtcgagcaggcgctgaatgaaacgccggataagctgaaccgcgatcgccgactggtgctgttgagcgacccggtaaccatgtcgcgtctgcactatcgcgtatgggccgcgccggagaaatactcttcatgggtgaacgcctatcagcagttggcgcttaacccgctggcgctgaaaacgaaataagccgtacgttaaggaaaataccggcagcgatgccggtatttttttatctgaaatacgaggatgtggatgcgaatactaccgatcattgccatggcgctgctgctcagcggctgcggcagcattatcagccgtacggtgcccgggcaggggcatggcaatcaatattacccgggcgtacagtgggatgttcgcgattcggcatggcgctatctcaccattctcgacctgccgttctcgctggtatttgatacgcttctgctgcctctggacgccagccacggaccctataactgattaacgctcgtcccactcgtcggctgccgtctgcccctcttcggtgtccagcgagggctcaagctgaaattcgccttcatcccattcgtggagcgtattttcctccagccactcctgacgcagctctatctcatcataatccccgtcgaagacgctctgcgcggcttcgccgctgagcatcgggaggcattcgccttgttcctcttcgtcagcaaaaaattcggcctgccaggcgatatcgccatcctgcagcacatacttttgaatgttgagctgctcaacgttggcgctctcttcatcgctgtcagggttgttggcgagaaattcttcacgtgctgcatcaatagcttcttcaagcgtggcgtagaacatcgaatcctttggcatagcgaatctcctgagaagaatatgaattgaacacgattcaatctatagaaggcggtacgcacggcgtcaagggacagagccactctcgacgttaatttactgaatgcgaagtatccgcggctggccgacgcaggctgagggtggagtagatcgcattaaacaataccacccctgcggtgaccagaaatacagcgcggaagccatagttagcggaaaccgacgcgccaatcagggggccggtaacgttgccaatatcgcggaacgactggttatagctgaagattcgcccggagatctggctggtggagttgtacaccagcagggtttgcaccgccggcagcagcgcgccgtccgcggcgccgagcaggaatcgcaggatacctaactgcagcggggtctgaacgaacgacatcgggatcaggagtagcaccgagataatcagcgccacgatgaggattttttccggcccgatgcgatcccccagtttgcccagccgcggggcgctcatcagcgcggcaatgcccggcaccgaggcgatcattccgctgataaaggcgatgttactgacgttgcccgcgagatcgcgtacataaagcgtcaggatcggcgcaatggaaccggtggccacctggattatcagcgaggtcacaaacaggctgagcaccagtttgggattctgcagcgaggagaacacctctctggcactgagcatctctttcctggcgatcggcacaaaattttcgcggattaaaaacagggtaaacaagaaacagataaatagtaccgccgcggtcataaagaagacggtgcgcaatccccagtggtcggccaggaagccacctgccagcgggccgagcagggcgccgcttaccgcgccggtagacagtgtccccagcgcccagccgcttttatggcgcgggatctgggtggcgatcagggcgttggcgttaggaataaaaccgcccagcaggccgagcaatgcgcgcagcagcagaaactgccagatattctgcgccattcccatcagcatcatcacgatggccatcccgagggcggaacgcagcagcatgatttttctccccttgcgatcagcaagccccccccagaacggcgaggcgatggcagagaaaagaaaggtaatactaaagaccagcccggaccacatgttcagggcgctatgcccggtgacgccgagctgttcgacgtagagtggcagaaagggcatgaccaggctgaaggcggcgccggttaaaaagcagccaagccaggtcacggtcaggtttcgtttccagttaatgggggtttcagcagacgacatagggttccactggcctgcgcggcaggtcaaattaagagaaaatatgagcctgctaattatgcgcctgagaaatagatgccgcaatggaggagagcttttaaagctaaaggagagcctaaagcctgagcggcgaagcttcccggccgggatgagcgcggccgggaaaagggatcagtagcgggagggcatgccttcggggcgggttttgaatcgacgatggagccacatatactgttccggggccatcatgatgcactgctcaacgatcttgttcatccacgcggcggtggtttccgcgtcgtccagcggcggggaacactctggcggcaggataatcagttcataacctttaccgtccggtttgcggcgcgggacgaagggcacgatgcaggctttggacattttcgccagcatccaggtgccggaggtggtcgccgcctggtcgaccgcaaacagtggggcgaagacgctggcggtcgggccgtaatcgtgatccggtgcgtaccacaccacttcgccttttttcagtgcccggatcatgcctttcagatccttacggtcaatcatatccttgttggagcgcaagcggccccaggtctgcagccagtcgatcaccgggttgtcgttggggcgatagacgccaatccccggctcgttcataccgaacatccgcgcacccatctcgagagtgaggaaatgaataccgatcagcagaatgccgcgctgctgcgcctgcacatcgcgaatatgctcaaagccgatggtgtcggtccagcgggcgatacggcgaaccggccagaaccaggccataccggtctccatcagccccatgcccaccgattcaaagttcatcaccaccattcggtggcgttcctgctcgcttttctcggggaagcagagctcaaggttgcgataggcgattttcgcccggcgcttcataaagcgcatggccagacggccgatggcgttcccgaggcggtagatcagcgggtagggcagttggacaaccagccacagcaggccgatacccagccacagcagccaatagcgcggatgcaacagcgccggagaaaatttaggcaaatgagtcatttcatacccgtatcagtgagcaacgtcttatattatcgcatttttttaccggccagccaaaggcggcgacagtcagctcgttttgttaagcggggcgcaaccgggtgagagaaatgtagcgtaaaatgtagggatgtaaattaaacagctttgctatatcatgcccgccgtttatttcctcatttctatgtcgagcaggtacaccatgccagtgttacacaaccgcatttcaaatgagacgttaaaggcgcaaatgctggctgaaaccgagccgcgcacgacgatctcattctataaatatttcaccattgtcgacccgcaggcgacccgtgatgcgctgtgggttgccttaacccagctgaaggtctttggccgcatctatctggcccgggaagggatcaacgcgcaaatcagcgtgccgcaaagcaacgttgaggctctgcgtgagtttctctatggcttcgatccggcgctggcggggctgcgtttcaatatcgccgtggaggacgatggtaagtctttctgggtgctgcgcctgaaagttcgcgatcgtatcgtcgccgacggcatcgacgatccctcgtttgacgcctccaatgtgggggagtatctcaaggcggcggaagtcaacgcgatgcttgacgatccggatgccgtgtttatcgatatgcgcaaccactatgaatatgaggtgggccatttcgaaaacgcgctggagatcccggcggataccttccgcgaccagctgccgaaagccgtggaaatgatgcaggaccataaagacaagaaaattgtcatgtattgcaccggcggcattcgctgtgaaaaagccagcgcctggatgaagcataacggcttcaataaggtctggcacatcgagggtggcatcatcgagtacgcccgtcgcgcccgcgagcaggggctgccggtgcgtttcattggtaaaaactttgtctttgatgagcggatgggcgagcggatctccaatgacgttatcgcgcactgtcatcagtgcggcgcgccgtgcgacacccatactaactgcctgaacgatggctgccatctgctgtttatccagtgcccgagctgcgccgagaagtttgccggctgctgtagcgaagcctgcatggaagagcataagctaccggaagaggagcagcgtaagctgcgcgccgggcgtgaaaacggcaacaaaatctttaataaatcccgtggccggctgaataccaaactcgggatcctcgacccggagccgtcagaaaaaccataaccagacgagatcgatgatcgccagcagcagccagagcgccaggtagatcataaaatgctcgcgcacgttgttgaccagcatattaaacaggcgacgcataatcgctctcaatcactaacggcctcagcagaggccgtttctttacccaacggcaaaagtgccgcattccattacgcgttaaagcgcgccagagaaaagggggccagattgaagctcgatgcttcgccctgagcaaactgactggcaatttcgcccagcaccggcgcaaacttaaagccgtggccgctcagcccggtgatcagcagcgtgtctggcctgcctggcaacgtatcgataataaagtcctcatcgacggtattgtcgtaggtacaggaggcgccgtgcaggcagccgccgatgccaggcaggacgttacgcaaaaacgggaaggattcggaaccatcgctggcgacagcgccaaacgctacccgctcctgcggggtggagatcggctggccgccgttatgcttgccaattttcagttcattatcttccgccgggaaaccgtaatattgatcgccgttgggcaactcgccggtgaaggccgggaagtgattcttgctgctgtaacggccatcggcctggtaccaggcgaacaccttgcgtaccggctggatagggaggtccggaagcaggcgggtgacccaggtgccggcgctgaccagcagctttttaccatgatattcaccgtcgagggtatcgatggtgatcccgtcagcatggtgatgaatagccgagaccggacagttgaatagctgcgcgcagcctgcttccagcgccagacggatccaggtttcgacggccagttcgctgcgcagtacgccggaagcgggttcgaaaatcgcccgatagtcatcggggaggcgtatctccggccagcgctgcatcacggcctgggcatcaagctcttccacctcaagctggaacgcacgggcgctggcggcgacgttggcgagaaaagcggagctggcggggccgaggttaatgacgccggtgcgttcaaacacggcttcgccactgatctctgccagttcgtcccatagctgctgggcacgcagcaccagcggaacatatttctcaccttcgccataggcgtgacggataagacggctgctgccgtgatggctgccttcctggtggggaggttgatgggcatcggtcatcagaacattgagtccggcacggcgcgcataatagccagcggcggcgccgacggagccgctgccaataatgataagatcgtattgcatggtgagttccgggtaattgccttgttagcagggtaattaactccctgtgcttatacaagcccgaaaataattcaggcacccgcaggtgcctgttaagtttaatgttaagtcattcgcaagccgcgttaatgtcggcggtactcgttttcctggtattcgccagattcaatcttcgcaatgcctgcttccaggattgaaataaactgacgtgcgacgtccgtcgttagccatagcgtctggccgatctcagcatcattactgttttcttgagtggggttctggtagtgcaggcgcaacatcagcgcatcgtagctatcaacggtgctgatgtcccatccaacgaggggatgggtctgaatgacttcattatttttttccatcataaccccttattcatatgttaaaagacaacaattctcgaggtttaatgcatattttttgaagcaagttaattatatcagggatcaagaataaactcgagaaattaaatgaaaggcagcatgattttcttcttttgccgcttttttactcaagataagcgcgtaaaatggccactttagtcgatattgagcagaataatcaggactattctgaacagaagaggggataaaaaaagccggggcgacccggcaaaaaaagcacaatgagggagcaaaccagagtaactggatcccgccatgcttcaggagagatcgtggacaaaccagtcgtccgcgctttcccatgtttcctgcaggatttcgcttatccggtctttgtcttctttcagggcgccaaacaccgagagctgattgccgctggcgtagcggacgctcacctggctatcgatggccgggaattgctcggcgatacggcgagagagttcgttattcagcgcttccagcgcgccgttaggtaaggcggtcgttttggcgatagacacttcaatgcgcataattgccccctgcgttcgatactggttatttatacagtatccggttagcgttgacaacagggggctgcgtttttatttcttcacggtccagcgaacggtttcacccgccaggaagggcaccagggtgtcattaggcagggcaatgctgtccacaacggtcgtctcttcacgcaccagttcaacgtagctctcattgaccggcagaccgtagaagcgcgggccgtttagcgagcagaaagcctcaaagtgctgcagagcgttcatttcttcaaacaccgtggcgtagctgccgagggcggtcggggcgttaaagcagccggcgcagccacagctggcttccttacggtggcgggcgtgcggtgcggagtcggtgccgaggaaggcgcggctgaagccgctggcgaccagctcccgcagagcctgctgatgaatattgcgtttaagtaccggcagacagtacaggtgagggcgaatgccgcccaccagcatatggttgcggttgaacatcagatgctgcggggtgatggtagcagccagcagttcattaccgtcacgcacgtactcggcggcgtctttggtggtgatatgttcaaaaaccactttcaggccgggcaggcgctggcgcaggggctccatcaccgtctcaataaagcgcgcttcacgatcgaaaatatcaatctcggcgtgagtgacttcgccgtgaacgagcaacggcatccccagtttttccatccgctccagcactggcataatggcgtcggtgctggtgacgccgtggctggagttagtagtggcattggccgggtagagcttggcggcggtgaacaccccttcgttaaagccgcgttccagctccgctgggtcgagagagtctgtcagatagcaggtcatcagcggggtaaaatcatgcccggccggcacggcgtccataatgcgctggcggtaagcgatagccgccgcgacggtggtgacaggcggcaccagattcggcatcacgatcgcccggccataaaactcactggtataaggcacgacggttttcagcatatcgtcatcgcgcagatggatatgccagtcgtctggacggcggattttcaatacctgggattgtgctgtcatggaaggctccggctaataggttcagtcatcagggctgttttttgccgggcactaaggataagcgtaaacgttttcctttgcactcatttccgtaaaaaattcagggcgccgtagcgccctggagattaattggtaaaggggatgacaatctcgcctggcttcacctctatacctttggcgtatttcttcgccagcgcttcgccggtgctggcgtcctcacgcaggacataagccggctgctggctgaagtagctgcgcagagactgattcaggtaggggagcagggcctgaataaccgactgcagcttctccggcgccactttggcatcgaccacttccatttcctgcaggaagatggcgcctttctctcggtcaaaggttggcagcgctttgagcttcagatcgatcgtcgctttctgcgtgctgaacagggagttaagatcgacgttggcgatcccgctcagggtgactttgcccggctcctcgcgcccgatagcgctggtcaggttctgcagttcgatatgggcgtcggcaacgcctttcagaccaatatctttggcgaaatggtttcgcttctgcagggcctggttaatctcctgctcgcttaccgtgtattgggtcagctgattacagccgctcagcaggccgctgacaattagcgcggcggcgatcaatatctttttcatggggttcctcaagctcataccttccttcatcctgacacaaagcatcatgacctgtcagcacccatcgcgccagcagaataggctgaaagcaggagaaaccgccgccgcgcgcatcaggtgcgcggctccagcataccggaggcagagcgtttcggactgaattgccaccatagcgccaggaaggtgataaccccgatggcgccgagcatcagccacggccgttcgggctggccgacggctttcccggcatcaaacagccagccgccgcccgcgtaacccagcgcgccgccgaaggcgagccccagacggctgaaacccatatagctgccacgcgcccgggcgtccgccagcgaagcgcccagcgtctcgcgggcgggttcggcaatgatggagccgatgtaaaacaggcaaatcagggtaaacagctgctgtaaactgctggtcatcccgatggggagcatggccagggtcatcaccagcagaccggccatcagccggtgctcaaggcggaagcgtttttcgctccaacgggcaataggatagagcagggtgagcgaaatggtggcttcgatggcgtacatccatttcacggcggccggcgagccggcgatgtcattcaccatgatcggcagcatcagcatcacctgcaccgccagcatataatagccggtcagcgtcaggacataggtgacgaagcgtttgtcccgcagcacccggcccagaccctcgcgaatcggcgttttcaccgtcgagagcttccatgccggcagataccaggcgttaaacgcggcgcaggcgataaacagcgcggcgccggcgctgcacaccaggcgaaaatcatactgcagcagccagctgcccagcagcgcgccaatcaccgcgccggcgctatcctgcatcatcaggatggagaaaaagcggccgcgctgatgcggacgcaccagcttaaccaccagcgccgcccgcggcggatcgaacagtgtaccgccgagtccggagagtatgcacgagaaccacagcacccacggctcatgggcgacggccatcgccgcgaaaccgccggcacgcatcagcataccggtgacgatcatcggtttcgcgccgaagcggtcggcgatggcgccgccaaagatgcctaatccctgctgtaccagctggcgcaggccgagcgcaatgccgaccatcagcgctgcccagcccatctgatcgacaaagcggatggaaatcagcggaaaaacgacaaaaaagcccagcacgaccagcatgttatcgactaacaggaaatatttacccaggctccttgcctgcgagacgcgggacatttcccctccagggaaaaatagagataagcgaggatattctgcgggcaatctgctgcttttcccagcacccttgcgacaatatttttttatcaaaaagcaagatcgattgagcctattcatcgaaaagaggagatggcgcagaaaatggtatgttgctgttttcacactatcgtgcaggaaaggtatagtgatgaaagcaagagtgaagtcagggggactgaaaaaggaaatgtttggctatcgcagtaacgtgccgaaggtgcgtttgacgacggaccggctggtggtgcgcctggttcacgatcgtgacgcctggcgtctggccgattattacgccgaaaataaagcgttcttaaaaccctgggagccggttcgtgacgacagccactgctatccctccggatggcaggcgcgtctgtcgatgatcgctgagtttcataagcaggggtcagctttttatttcgcgctgctcgaccctgaggaaaaagagatcatcggtgtggcgaatttctccaacgtggtgcgcggatctttccatgcctgttatcttggctattccattggcgagaagtggcaggggcaggggctgatgtttgaagcgctgacgtcggcgattcgctatatgcagcgcacgcagcatattcatcgcattatggccaactacatgccgcataatcagcgcagcggcgcgctgctggcgcggttggggtttgaaaaagagggttacgccaaagattatctgctgattgacgggcagtggcgtgaccatgtactgacggcgctaacgacgccggactggtctgcgggacgttaaggagagaggatgaaatatcagttaactgcgcatgaagcgcgcgtcattggctgcctgctggaaaagcaggtcaccacccccgagcagtatccgctgtcggtaaatgccgtggtgaccgcctgcaatcagaaaaccaaccgcgagccagtgatgtcgctgagcgaaagcgaggtccaggccctgctggatacgctggtgaaacggcactatctgcgcacggtcagcggattcggtaatcgcgtcaccaagtatgaacagcgcttttgcaactccgaatttggcgatctgaagcttagcgccggcgaggttgcggtggtcacgacgctgctgctgcgcggtgctcagacgccgggcgaactacgcagtcgggcgcagcggatgtatgagttcagcgatatggcggaagtggaaagcgtgctggaagggctggcgacgcgcgaagatggccccttcgtcgcccggctgccccgggagccgggaaaacgggaaagccgctatatgcatctgttttgcgacgatatggacacgctgatcaccacagtggaagctctcgcgccgctggacgatgacggcgatctgcgcgccagggttgaagcgctggagggcgaggtggcggagctgaaagcgcgcctcgattcgctgttacaccatctgggagactaaaacgtggggacaagattgcgcattggggtggtcggcttaggcagcattgcgcagaaagcgtggctgccggtgctgggggcggcggaaagctggacgctgcaggcggcctggtcgccgggtaaagagaaggcgctacggatctgcgaaacctggcggatgccatacgctgattccctcgatgccctggcggcacagtgcgatgcggtctttgtccatacctcgacggcttcacattatgaagtagtgaatcacttactgaatgccggggttcatgtttgtgtggataaaccattggcggacaagctgagtgaggcggagacgctggtcgagctggcggcgcgacgtcgactgacgttgatggtcggtttcaatcgccgcttcgcgccgctctatcgggagctgaaggggcggctgggcgaggcggcctcgctgcggatggataaacaccgtagcgatagcgtcggcaacgatctgcgctttacgctgcttgatgactatctgcatgtggtggataccgcgctatggctggccgacggtcaggcacgtctgcgcggcggcgcgctgaagatcaccccgcagggcgaaatgctctatgccgaacatcagttcagttcgccccggctgcaggtcaccaccagcatgcatcgtcgcgcaggcagccagcgcgagtgggtgcaggcggtcacggatggcgggctatatgccgtcagcgagatgcgcgaatggcaggaggagtgcggtcatggcgtggtccagcgcccggttgccggctggcaaaccacccttgagcagcgcggctttgtcggctgcgcgcgccattttatcgaatgcgtgcaaaatcagacagttcctgaaactgcaggcgaacaggcgctgctggctcagcggatcgttgagaaactgtggcgcgacgccattagcgaataatccattgtaacaactgacagtagtaattcatgttgaacccggtagactatcgccactttccagcgcccgcatttgcgggcgttttactccagggtttggaataacagcgtaatgaaccttttaaaatcactggcggcagtcagttcgatgaccatgttttcgcgcgtgctgggctttgcccgcgatgcgattgtggcgcgtatttttggcgccgggatggcgaccgatgccttttttgtcgccttcaaactgcctaacctgctgcggcgtatttttgccgaaggcgccttctcacaggcgtttgtgccgatccttgccgaatataaaagcaagcagggcgaagatgccacccgcgtgtttgtctcatacgtctccgggctgctgaccctggccctggctatcgttaccgttatcgggatgctggcggcgccgtgggtaatcaccattactgcgcccggctttgccgataccgccgataagtttgcgctaaccacccagctgctgcgtattacctttccctatattttgctgatctccctggcttcgctggtgggggcgatcctcaatacctggaaccgcttctcggtgccggcctttgcgccgacgttcctcaacgtcagtatgattggttttgcgctgtttgccgcgccgtatttccatccgccggtgctggcgctggcctgggcggtgacggtcggcggcgtgctgcagctggcttaccagctgccgcatctgaagaagattggcatgctggtcctgccgcgaattaatctgaaagatgccggcgcgatgcgggtggtgaagcagatggggccggcgatccttggcgtgtcggtaagccagatctcccttatcatcaataccattttcgcctcattcctcgtgtcgggctcggtgtcgtggatgtattatgccgaccgcctgatggagtttccctccggcgtgctgggcgtggcgctcggcactatcctgctgccatcgctgtcaaaaagcttcgccagcggtaaccatgacgagtattgccggctgatggactggggactgcgtctctgttttctgctggcgctgccgagcgcggtggcgctggggatcctcgccaaaccgctaaccgtggctctgttccagtacggcaaattcagcgcctttgacgcggcgatgacccagcgcgcgctggtggcttattccgtggggctgatgggccttatcgtggtgaaagtgctggcgccgggcttctattcccgtcaggacatcaagaccccggtcaagattgctattatcaccctgattatgacccaggtaatgaacctggcgtttatcggcccgctgaagcatgcgggtctgtcgctgtccatcggcctggcggcctgcctgaacgccgcgctgctctactggcagctgcgtaaacagaaaattttcaccccgcagccaggctggttggccttcctgctgcgtctgattattgcagtgctggttatggccgcggcgctgctgggcgtcatgcatctcatgcctgagtggtcgctggggacgatgccgttccgtctgatgcgtttgctggcggtggttatcgccggggtggtagcctatttcgccacgctgctggtgctgggcttccgcgtgaaagagtttgtccgtcgcacggcgtaagcggttgtgagggtagaaaaaccccgcttcgcctcaggcgaagcggggttttttttatgatgcgctgcgttcggcagcgaggatgcgggcattctccagcaggcggatcgccagggctagcgcgccagtgatcactgccagcgtgaccactccgttccagccggccagcacgtacagcttactgcccagcaccgaccccagcgacatcccgataaacaccacggtgaacagcagggcgttgaggcggccgcgggcctgtggctcaaggccatataccaggttctgatgcgccaccaggcttgactgcaggccaaggtcaaagccaatcgccgacagggcaatcagcgccaactgagcgtgtactggcagcagcggcagcataaacatcagggcaaaggagagggtgaccagcgccgcacccatctgtgtcaccttaccggcgccaaatttatcggccagaccgccggcaagcggcgcggccagcgccccggcggccccggcgataccgaaaccgcccgctactgcgctgcccatgtgatagtgttcggagagcatcaccgccagcgtcgaccagaaggcgctaaaagcgatggagagcgcgccctgagctagcgcggcgcggcgtaatgccgggtaacgctgccacagatgcgccatcgaggccatcagctgcggatagctcagcgtcgagtgcacagcgaagcgcggcaggacgcgccacattaccaggccaatcagcgcgacgctgaccgccgccgcctgatacatcacccgccagccgaatacggcgcccaccacgccgctgaccgtccgggagagcaggatccccagcagcagcccggtcatcaccgtgcccaccatttttccctgcttgcccgccggggcgaggatcgccgccgccgggacgatatcctgcgccatggtcgccgccataccgatcagcagactgaccaccagcagtgagctgagctggccggtgaggctgcacaggagcagcaggagcgccagcagcgcgcttttcaccaggatcagccggcggcgatcgtggcggtcgccgagcgggagcaggaacagaatgccgagcgcataacccgcctgcgtcagggtagggaccagacccataccttctacagtcaggtggagattggcgcccatcaacggcagcagcggctgcgcgtagtaaatagaggcgacgctaaagccggcgccgagtgcgagaatgaagataatccagcctgcgtcgcgggtggaaagggaagtcggtgtcatgttcaatgcctcatagatgcgatggggctatttttccctgaacgcgactggcgcggtagccgggctggtggtaaaacggttatacgtagcacgtataggcaaaaggaaaatgaaaagacaagagcgtatagaccgcattgagctgatgcgcacctatatccgcatcgtagaggccggatcgctctccgccgccgcagggcagatggacactacccaggcgaccgtcagccgccgcctgcagtcccttgaagggctgctgggggttaagctgatcctgcgcaccacccatgcgatgaagctcactgacgatggcgaacgctgttatcgtcacgcccgtcaggtggtggacgcctggctggcgctggaggatgacctgcgtattgccgacgatcggccggtgggcgttctgcgagtgcgggcgccccacgcgtttggccagcagcagctgctggcgccgctggtggcatttctacagcgccatccgcagctgtcggtggagtggatgctaaacgataataccgtcgacttcctcagcgataatatcgactgcgctattcgcgtgggggcggaggtggatccagcaacggtatccgtactgctggcggaagtgccgcgctgcgtagtggcttctcctgagctgctggcgaagtatccgccgttaacctcgctggaggcgttatcgggcctgccatggatcgccattaataccttttatcagcatgaggtacggctcaggcatcaggcaagcgggcagattgtctctacagcgattactccctgtctgagcactgacagtctttacgtcgcgcgcaacaccgcgctggcggggctgggggtggcgatggtgtccagctggacggtcgtggaggatattgccgccggacggctgattgagctgttcccgcagtggcgacccgcctcgctgccggttcatctggtttatccctgggcgcgctattacccgacacgcctgcgtaagttcctcgacctgatgcgggagatcatgccggatctcgccgggatgcagcgtccgcaaagcgcataaaaaaaccggccaaaggccggtttttttattaagcacgcttactcgacgggctgtgggcgagtcggttcagcggtggctttatgggtcgcgctatgaccaccggcggcgcctttaccttcaaaggcgaacggcgggcgcacccaggtgctgtgacgcggtgcttccgggacatagtccggagctggcgcacgggtcattggcgcggtggcatggcgatgacccgccactacgaccggcttgctcaccgggggctcggctttgaccggttcggcaggggccgcttcggtcactggcgcttgctccacggtttctgcgaccggggcgatagtttccactggcgctgcaacgacaggcgtcgtttccaccgcttcaggttctaccaccaccggctcggcgtcgagcgtcactggcgcgatagcctgaggcgcttcgacagccggtgcttcggtgaccggctcctgaggcgctggctcgacggctgctggcgcgacaacttccgcagcatcaacgaccagcggctcggcggccgctaccggctcgacgactaccggctcagcggttactggttccatggtagccggctcgacggtgaccggcgcagcggtaacggtttcaacgacggcaaccggggccgctacggcctcgacagttttcgcgacgctggcgtcctgaacctgaacctcttccggctgctgatcctgcggacgaaccaccgggtagcggatccagactttaccggaagccatctccggcgatgcgcaggctacggtcagcggcataggcgactgggtcggatagcgttcgtcacgatagcgacgacgacgctgaccgctgacgcgcaggtgacgcggggagcgacgtgagcgacgcggcataccgttcgcttcacgggattcgccattttcgtcctggtccgccacgctctccacccctgccggcagctcggctttcaccggctcgctgtgcggagcgataacttcagccactacggcttctggcacgatctcggcaactggctcgacgacagcggactcaacgcgcactttctgtgccagctggcgcggtttacgacgcggcagagtttgtacacgctcttcctgctccgtctcctgcacaaccggctcttcgcgagtctgcgctttggcttcctgctgcgcctgacgtttgtcgtcattgcggcggcgggtgcgttcgcggcgcggctgctgctcgtcacgggatttcgctttctccgcgtcgtcgcctgaggtttggcgaacatcacgggcttccacgttctgcgacggcttctcgcgacggttgcgacggttctcttcacgcgattcgcgcggttcacggccctcggcattgtccgcacgggtgtcgcgattgtcacggttatcgcggttgtcacgattgtcgcggttatcacggcggtcgttgcggtcgcggcggttgttggcgcgcggtttacgacgctcctgctgacgctccggtttttcttccgctttcttctcgatctcaacttcagccggtttggcctcttcggcgccagagaagatattcttcagcgcgctgaagaagcgtgagagcaggccaggctgcgccggtgcggcggccgcgaccggtgccgctgcggcgacaggcgcggcggcaggctcttcgagcatcggggctggcggcgcatctggcatgacaaaagcggccagggccggctgttccggacgtttccgctccgccggctcatcgtcgcctggcagcgccatctcttcttcatgcagcttcggcagcagatagctcagcgttgaggtttcttcacctttgcgcacgcgcaggacggagtagtgcggcgtttgcatttcgtcgtttggcacgataataacgcgcacatcgccctgacgggattcgatagcgctcactgcggcacgtttttcgttcagcagataggaggcgatcggtaccggaacaatggcgtggacttctttggtattctctttcagcgcttcttcttcgatcagacgcagaatagagagcgacagcgattcgttatcacgcacggtgccggtgccggagcagcgcgggcagacgtggtggctggactcgcccagcgacgggctcaggcgctgacgggacatctccagcaggccgaagcgcgaaatatggctgatctgaatgcgcgcccggtcctgacggacggcttcgcgcagacgattctccacggcgcgctggtggcgaaccggggtcatatcgatgaagtcgataacgatcaggccgccgaggtcgcgcagacgcagctggcgggcaatttcgtcagccgcttcgaggttggtattgaaggctgtctcttcgatatcgccgccgcgggtggcgcgggcggagttgatatcgatcgcggtcagcgcttcggtgctatcgataacgatagacccgccggaaggcaggcgcacttcgcgctggaaggcggactcaatttgcgattcgatctgataatggctgaacagcgggatttcaccggtgtacagtttgattttgctgctgaaatccggacgacccagcgcggcgatatgctggcgcgccagctcaagcactttcgggttatcgatcaggatttcgccgatgtcctggcgcaggtagtcacggaaggcgcggacaatgacgttgctttcctggtggatcaggaacggcgccggacggctttccgcggctttctgaatcgcttcccagtgcttcaggcggaagctcaggtcccactgcagggcttcggcggatttgccgacgccagcggtgcgaacgatcaggcccatgccgtccggaagctccaggctcgccagcgcttctttcagttcggtacggtcgtcgccctcgatacggcgggaaattcccccggcgcgcgggttgttcggcatcagtaccagatagctgcccgccaggctgataaaggtggtgagcgcagcgcctttgttgccgcgttcttctttatcaatctgcacgataacttcctgaccttcccgcagtacgtctttgatattaggacgaccatgcgcattgtagttggcggggaagtattcgcgggcgatttctttgagggggaggaaaccatgacgctcggcgccgtaatcaacaaacgcggcttcaaggctgggttcaatgcgggtgattttgcctttgtagatgttcgcttttttctgttcgtgcccggggctttcgatatccaggtcgtacaggcgctgcccatcaacaagggcgacgcgcaactcttcctgctgagttgcgttgattaacattcttttcatcgtaacttactcattattcttacattgacgactaagctgcgggcagagtaatgcctttccgggggaaaaccgatggcctcgtgtctggttcacgtcgccaacctcacggttgtcgcgcgcttaagaggcgcagagtgtcggtcgcctgtgtttcaaacggaaacacagcgcaattattcaggggaacagcctgggatgtatcaccagagaatattccatttatactcgtcgtctttcgcgttgcaggcatggtggcttaacctgctcacctcgatctggcgatccagatgagctcccgggagtcccggagttgacgccttcctgcgacttgaaatccatagagcctgtaccggtaaggactgcaacccgcagcccgctaactgtctgaaagatcacaacgtcttacgccattgctgcgtgggcgatcggtcagacaaaattggtcattccgctaatgtcttgttctaacaagatgcaatacggaaaacggtctcattattccattgctaaccttgttatagcaagttgactttcaccttttatcacccggttactcacagttttatcacctgcccatacagattgttctaataacaaacaaaatggcggtcaggtaaaccgtgaaaacaggataatgataaatataagcatataaaaatgagtggcgctaatgcgtccggctatttagaatcgcgcaccatgaaaactgagaccccaaccgtaaaaatggttgccattgctgctgatgaagcggggcaacgtatcgacaactttttgcgtacgcaattgaaaggcgtaccgaagagcatgatttatcgcatcctgcgtaaaggcgaggtgcgggtaaacaaaaagcgcgtgaagccggagtataagctggaagcgggcgatgaagtccgtatcccgccggtacgcgtggcggagcgtgaagaagaggcggtatcgccgcacctgcagaaagtggccgcgctctctgaggtgatcctctatgaagacgatcatattctggtgctcaataagccttctggtactgcggtacacggcggcagcggcctgagcttcggcgtgattgaagggctgcgcgccctgcgcccggaggcgcgcttccttgagctggtgcatcgtctcgaccgggatacctccggcgtgctgctggtggcgaaaaagcgctcagcgctgcgttcgctgcacgagcaactgcgcgataaaggcatgcagaaagattatctggcgctggtgcgcggccagtggcagtcgcataccaaagtggtccaggccccgctgttgaagaatattctgcagagcggggagcgcatcgttcgcgtgagtcaggaaggcaagccgtcggagacgcgctttaaagtggaagagcgttacgaattcgccacgctggtgcgctgcagcccggtcaccggccgcacgcatcagatccgcgttcatacgcagtatgccggccatcctatcgcttttgacgaccgctatggcgaccgcgagttcgacaagcagctgtccgctaccggcttaaaccgcctgttcctgcacgcggcggcgctgaagtttacccacccggggagcggggaggtgatgcgcgttgaggcgccgctggacaaccagctgaagcactgtttacaggtgctacggaagagcaaataagcgcaacggcggaatcagttccgccgttttttttgcctcagcctaacagcgggttgtagttttcacggcgcaacatctgacagagcgcgattaagggtaaaccgaccagggtgttcgggtcgcggccttccagccgttcgaacagcgtaatgcccaatccttcgctcttgaaactcccggcgcactgcagcgggttctctttgcgcacatagccttctatctctttatcactgagatggcgaaagtgaacgtcaaagggttcgcattcggtttgcagatggccgctggcagagttgtacagcgccagtccggtataaaaggtaatgattgacccgctggcctttcttaactgcctgcgggcattttcctcggtgtgcggtttgccggtgatttcaccgtccagtacgcaaacctgatcggagcctataataaggtgattagggaagcgtgtggccagactttgcgctttggcctgcgccagtcgggtgacaagctgacgtgcggattcatcaggccggggcgtttcgtcgacgtcaggcgcggcacattcaaacggtaaacccagtttttccagcagcatgcgccgccagggagaggttgacgcgaggataagatcagacatattttttcatccacatatagcgcttcgcagagcatcatcttaaactatgcgccgcaatgtgtgcgaataaatggcaaaaggcaacctgaggctgcctttttctttgactctatgacattacaaagttaatatgcgcgccctatgcaaaaggtaaaattacccctgactcttgatccggtacgcacggctcaaaaacgccttgattacgaaggcatctatgcccgcgatcaggttgaacgtgtaaccgattctgtagtcagcgtggacagcgatgtggaatgcagcatgtcgttcgctatcgataaccagcgtctcgccgttattactggcgatgcaaaggtaacggtaactctcgaatgccagcgttgcgggaaaccgttctcccatcacgtccacaccacgtattgttttagccccgtcagaaatgacgaacaggccgaagcactaccggaagcgtatgagccgattgaggttaacgaattcggtgaaatcgacctgcaggcaatggtcgaggatgaaattatcctctccctgcccgtagttccggtgcatgattctgaacactgtgaagtgtccgacgcggacatggtctttggcgaactgcctgaagaggcacaaaaaccaaacccatttgccgtattagccagcttaaagcgtaagtaattgaggagtaaggtccatggccgtacaacagaataaaccaacccgttccaaacgtggcatgcgtcgttcccatgacgcgctgaccgcagtcaccagcctgtctgtagacaaaacttctggtgagaaacacctgcgtcaccacatcactgccgacggtttctaccgcggtcgcaaggttatcgctaagtaatcacgcgatactcgcaggatttcccgttgcaggccatggcgggcgtgtgcgtccctggaaactcggttaacccggtcgctgggggcatttatgcccggattgttgcgtctgcagcgtgaatattcgcgggtgccagcgtgatgaagcttagtgaggactccccgggcaactggggaatcaccgaaccgggcagcgacgataccttgacacgtctaaccctggcgttagatgtcatggggggcgatttcggcccatccgtgacggtgcctgcagcactgcaggcactgaactctaattcgcaactcacacttcttttagtcggcgatcccgacgccatcacgccattactcgccaaagctgatttcgaacaacgttcgcgtctgcagatcattcctgcgcagtcagttattgccagtgatgcgcgacccgcacaggctatccgcagcagtcgcggaagctcaatgcgcgtggcgctggagcttgtgaaagaagggcgggcgcaagcctgcgtcagcgctggcaacaccggcgcgctgatgggtctggcgaaactgctgctcaaaccgatcgaaggtattgagcggccggcgctggtgacggttttaccgcaccagcagaagggcaaaaccgtggtgctggatctcggcgccaacgtcgattgcgacagcacgatgctggtgcagttcgcggtaatgggcgcggtgctggcggaagaagtggtcggcattgccaacccccgcgtcgctttgttgaacatcggcgaagaagagatgaaaggcctcggcagcatccgcgatgctgccgcagtgctcaaaacgctgccttccctcaactacatcggctatcttgaagccaatgaactgttgaccggaaaaaccgatgtgctggtttgtgatggattcacgggcaacgtcacattaaaaaccatggaaggtgttgtcagaatgttcctttcactgctgaaatctcagggagagggcaaaaaacggtcgtggtggctgctgttactaaaacgttggttacaaaaaagcctggcgaggcgattcagtcacctcaaccccgaccagtataatggcgcctgtctgttaggattgcgcggttccgtgatcaagagtcatggtgctgccaatcaacgcgcctttagcgtcgcgatagagcaggcagtgcaggcggtgcagcggcagatccctcagcggatcgccgcgcgcctggaatctttatacccagctggtttcgagctgccggaaagcgacagtgacgtgaacgcccgacagcaaagcgggacgaatggccacgattgacgccgcggcggttgaacgaggcgggtatatcacccaagagtgactgagcgtacatgtatacgaagattattggtaccggcagctatctgcccgagcaagtgcgtacaaacgccgacctggaaaaaatggtagaaacctctgacgagtggattgtcacccgcacaggtatccgtgagcgtcgtattgccgcagcgcatgaaacagttgctacgatgggctttgaagccgcaaagcaggcgctggcgatggcgggcgtgtccgcggagcaaattggtctgattatcgttgcgaccacctccggcacgcacgcgtttccgagttctgcatgccagatccagtcaatgctgggcgttaagggttgcccggcgtttgatgtcgccgccgcctgcgccggtttcacctatgcgctaagcgtcgccgatcagtatgtgaagaacggcgcggtagattatgcgctggttgttggcgccgatgtgctggcgcgcacctgcgatccggcggatcgcggaacgattattattttcggcgacggcgccggcgcggttgtgctgggcgcctccgaagagccgggcattatctcgacgcatctgcatgccgacggcagctatggcgaactgctgaccctgccgaacgccgatcgcgtcgatccggaaaacccgatctatctgacgatggccggcaacgaagtcttcaaagtggcggtcaccgagctggcgcacatcgttgatgagacgctggcagcgaataatcttgaacgttcagcgctggactggctggtgccgcatcaggctaacctgcgtattatcagcgcgacggcgaagaaactgggtatgtcgatggataacgtcgttgtgaccctcgaccgccatggcaacacctccgcggcgtcagtcccttgcgcgctggatgaggccgtccgcgatggccgtattcagcgcggtcagctgattttgctggaagcctttggtggcggtttcacctggggttccgcgctggttcgtttttagtataaggatttaaacatgacgcaattcgcatttgtgttcccggggcagggctctcaggccgtaggcatgctggccgaaatggctgccgcctggccggtcattgaagagaccttcggtgaagcttccgcagcgttgggttacgatctgtgggcgctgacgcaacagggcccggcagaagaactgaataagacctggcagactcaaccggcgctgctcgccgcctccgtggcgctgtaccgcgtctggcaacagcagggcggcaaagcgccagcgctgctggcgggtcacagcctcggcgaatactccgcgctggtatgcgcgggcgttatcggtttcgctgatgccgttcgcctggttgagctgcgtggtaaattcatgcaggaagccgtaccggaaggtaccggcgccatgtccgcgattatcggtctggacgacgccgctatcgccaaagcctgtgaagagtctgccgaagggcaggtggtctctccggtgaactacaattctccgggccaggtggttatcgccgggcacaaagaggccgttgaacgtgcgggcgccgcctgtaaagccgccggtgccaaacgcgcgctgccgctgccggtgagcgtgccgtcccactgcgcgctgatgaagccagccgcagaaaaactggcggtagagctgcagaagatcaccttcaacgcgccgacgattccggtggtgaataacgtcgacgtgaagtgcgaaaccgcgccggacgccattcgcgacgcgctggtgcgccagctgtacagcccggtgcagtggaccaaaaccgttgagtttatggctgccgagggcgtatcgcatctgtatgaggttggcccgggtaaagtcctcaccggcctgaccaaacgtattgttgacaccctgaccgcttccgcgcttaacgagccggcggcgatgtctgcggcgcttgagcaataaaagaggaaaaccatgagttttgaaggaaaaatcgcgctggttaccggtgcaagccgcggtattggccgtgccatcgctgaaacgctcgtcgcccgtggcgcgaaagttatcggtactgcgaccagcgaaagcggcgcgcaggcgatcagcgactatttaggcgccaatggtaaaggtctgatgttgaatgtgaccgacccggcatctattgaatctgttctggaaaatgtgcgcgcagagtttggcgaagtggatatcctggtgaataatgccgggatcactcgcgacaatctgttaatgcgcatgaaagatgacgagtggaacgatattatcgaaaccaacctgtcatcggttttccgtctgtcaaaagcggtaatgcgcgctatgatgaaaaagcgtcatggacgtattatcactatcggttctgtggttggtaccatgggaaatgcgggtcaggccaactacgccgcggcgaaagcgggtctgatcggcttcagtaaatcactggcgcgtgaagttgcgtcccgcggtattactgtaaacgttgttgctccgggctttattgaaacggacatgacgcgtgcgctgaccgatgagcagcgtgcgggtacgctggcggcagttcctgcggggcgccttggcaccccaaatgaaatcgccagcgcggttgcatttttagcctctgacgaagcaagttacatcactggtgaaacgttgcacgtcaacggcggaatgtacatggtctgaccgagatttgtgcaaaacgttcaggaaccgcgcacttcgcacggttctatgtgcggttttgtgcgaaaagatttgcgttcttagggcaaacggcctcaaaatagcgcaaaatcgtggtaagacctgccgggatttagttgcaaatttttcaacattttatacactacgaaaaccatcgcgaaagcgagttttgataggaaatttaagagtatgagcactatcgaagaacgcgttaagaaaattatcggcgagcagctgggcgttaagcaggaagaagttaccaacaatgcttccttcgttgaagacctgggcgctgattctcttgacaccgttgagctggtaatggctctggaagaagagtttgatactgagattccggacgaagaagctgagaaaatcaccaccgttcaggctgccattgattacatcaacggccaccaggcgtaagtgaacatctccaggcggtcattcgaccgcctgagttttatctttttattgtcccacaagaatctattttccctccctggaggacaaacgtgtctaagcgtcgtgtagttgtgaccggactgggcatgttgtctcctgtcggcaataccgtagagtctacctggaaagctctccttgccggtcagagtggcatcagcctgatcgaccatttcgatactagcgcctatgcaacgaaatttgctggcttagtaaaggattttaactgtgatgacattatctcgcgcaaagaacagcgcaagatggatgccttcattcaatatggaattgtcgctggcgttcaggccatgcaggattctggccttgaagtgacggaagagaatgcaacccgtattggcgccgctatcggctccggtattggcggtctcggcttgatcgaagaaaaccacagttcgctggttaacggcggaccgcgcaagatcagcccattcttcgttccttccacaattgttaacatggtggccggacatctgaccatcatgtttggtctgcgtgggccaagtatctctatcgcgaccgcgtgtacttcaggcgtgcacaacatcggccaggccgcgcgcatcatcgcctatggcgatgccgatgcgatggtggcaggcggcgcggaaaaagccagcaccccgcttggcgtgggcggcttcggcgcggcgcgtgcgctctccacgcgcaatgacaacccgcaggcggcgagccgtccgtgggataaagatcgtgacggcttcgtgctgggcgacggcgcgggtatggtggtgctggaagagtacgagcatgccaaaaaacgcggcgccaaaatctacgccgagatcgttggcttcggcatgagcagcgatgcttaccacatgacgtcaccgccggaagatggcgcgggcgccgcgctggcaatggtgaatgctattcgcgatgcgggcatcgaaccgggccagatcggctacgtcaacgcccacggcacctcgacgccggccggcgataaagcggaagcgcaggcggttaagtctgtcttcggtgatgcggcgagccgcgtactggtgagctctaccaaatccatgaccgggcatctgctgggtgcggcaggggcggtagagtcgatttactctatcctggcgctgcgcgatcaggcggttccgccgacgatcaacctcgacaacccggatgaaggctgcgacctcgacttcgttccacacgaagcgcgtcaggtttccggtatggagtacaccctgtgcaactccttcggctttggcggcactaacggttcgctgatcttcaaaaaagtgtgacagggcttgccccggtactgctttaacaaaaggcccgttcatcgggccttttttattcagctttctccccttgttctctgctctgggtcctgacacactgaccgaccagtgaaaaggagtcctttatgttcttgataaacggcgttgtacaggacacgttggcagcgaacgatcgcgccacccagtttggcgacggctgttttaccaccgcccgcatccagcaagggcaggttgcgctactggacgcccatctgcagcgtttgcagacaacctgtgaaaaattacatatcccatttaacgactggctgacgctgagcgaagagatgcagcgtctggctcggccgcacgcgcagggcgtgctcaaggtgactctcacccgcggcgttgggggaaggggatacagtacggcaggctgcgtgtcgcccactcgcattctcagcttctctccattcccggcgcattatgcgcgctggcgggaggagggcattactctgacccagagtccggtgcccctggggcgcaactcctggcttgccggcctgaagcaccttaatcgccttgagcaggtgctgatccgctctcatcttgagcagacggacgccgatgaggcgctggtccttgacagtgacgggtggcttacggaatgctgtgccgcgaatttattctggcgtcagggacgtgatgtatttactccgcgactcgattatgccggggtcaacggcattatgcggcagcgctgtatcgcgcagctggcaccatcgacgtttcgcgttgtcgaagtgacagcgcgtcccgagacattgcgggaggccgatgaagtgctgatctgcaatgcgctgatgccgctggtgccggttcgccgctgggaggagaccacctggtcctcgcgtgagctttaccattttttagcccctttgtgtgagctgtctggttagtatgaagaaaatgttacgttttatcctgttgctggtcgtgctgttgggcatcgccgcggcggcaggcatgtggaaggtacgccagctggcggacagcaagctgctgattaaggaagagaccatctttaccctcgaagccggcaccggccggctggcgctgggtcaggatctctatcgcgagaaggtgatcaatcgcccgcgcgttttccagtggctgctgcgggtggaacccgagctgtctcacttcaaggccgggacctatcgcttcgcgccgcaaatgacggtgcgcgagatgttgcagctgctggccagcggcaaagaggcgcagtttccgctgcgctttgtcgaaggcatgcgcgtcagcgactacctgcgccagctgcgcgatgccccgtacgtgaagcacacgcttggagacgatagctacgcgacggtggctaaggcattaggtcttgagcatgccgactgggtagagggctggttctggccggatacctggatgtacaccgccaacaccagcgatatcgccatcctcaagcgcgcgcatcagaaaatggtcgccgaagtggcgaaggtctgggaaggacggatggagaatctgccctatgccgatcagaaccagctgttgaccatggcctcgattattgaaaaagagaccgcggtagcggaagagcgcgaccgcgtcgcgtcggtatttatcaaccgcctgcgcatcggtatgcgcttgcagaccgatccgaccgtaatctacgggatgggcgcaggatatactggtaagttaacgcgtaaggatctcgagacgccgaccgcatacaatacttataccatcagcggtttgccgccgggccctatcgcggtgccgggcgaggcctcgctgaaggcggccgcccatccggcgaaaacgccatatctttatttcgtcgccgacgggaaagggggccatacgtttaccacaaacctggtcagtcataaccgtgcggtgcaggattatctgaaagtacttaaggaaaaaaatgcgcagtaactatatcgtcatcgaggggctggagggcgccgggaagaccaccgcacgtcaactggtggtggagacgctgcagtcggcgggtattcacgatatggtgtttacccgcgagccggggggcacaatccttgccgaaaaactgcgtagcctggtgctggatatccagtccacgggcgatgaagtgattaacgataaagcggaagtgctgatgttttacgcggcgcgcgtccagttggtggagaccgtgattaagcccgcgctggcccgcggccagtgggtgatcggcgatcgtcacgatctgtcgacgcaggcctatcagggcggcggccggggaattgaccgcacgatgctggcgacgctgcgcgacgcggtactcggtgattttcgccccaatctgacgctgtatctcgacgtcacgccggaagtggggctgcagcgcgcccgggcccgcggcgagctggatcgcattgagcaggagtccatgaactttttcaaccgtacccgcgcgcgctatcttgagctggccgccgccgatccttctatccgcacggttgacgcaactcagccgctggatgccgtggcgcgcgacattcgcgccacgatcgcccagtggatggcggagcaagcggcatgaaatggtatccgtggctgcgcccctcgttcgagcaactggtcggtagctatcaggccggacgaggccaccacgccttactgttacagtccctgaacgggatgggcggcgaggcgttgatttacgcgctgtgccgcttcctgatgtgccgccagcccgaaggacataaaagctgcggccactgccatagctgtcagctgatgcaggccggcacgcaccccgattactatgcgctcagccccgagaagggcaagagcgcgctgggtattgacgcggtgcgcgatgtcaatgaaaagctctatgaacatgcgcgccttggtggggcaaaagtggtctggattagcgatgctgccttgctgaccgatgccgccgccaacgcgttgctgaaaacgctggaggagcccccggagaatacctggttcttcctcgcctgcgaggagccggcgcgtctgctgaccactctgcgcagccgctgtcgcctgcatcatctggcgccgccgtctgagccttatgctctggcctggctggagcgtgaggtgagcctgccgcaggagtcattgttgaccgcgttacgcctgtgcgccagcgcgccggctgcggcgctcgaactgttacaggaaccgctgtggacggcgcggcagcagttgtgtcaggcgctggcggctaccctggcgagcggtgactggctggcgctgctgccgatactcaatcatgaacaggcggcggttcgcctgcactggctggcgtcgctgctggtcgatgcgcaaaaacgacagcaggggattaccctggtgagtaaccctgacgtctggccgctgctggagcagctggcgcacagcctgcccgccgcccggctgcaggcgattgcccatgacgtctgtacctgccgcgagcaattgctcaacgttgtcggtgtcaaccgcgaactgctgcttaccgagcgcctgctgcgctgggaacattacctgcaacccgggacgggtttacccgtctcccacctctgagtgagacattatgtttttagtcgactcccactgccatcttgatggtctggattatcaaactctacacaaaaacgtcgacgacgtgctggcaaaagcggccgcacgcgatgtgaaattttgcctcgccgtcgccacgacgctgcctggctaccgcagtatgcgcgaactggtggggacgcgtgacaacgtcgtcttctcctgtggcgtacacccattaaaccaggacgagccctgggaggtagagactctgcgcgcgctggcagcggaagagggcgtcgtggcgatgggggagaccggtctggattatttttataccccggaaactaaagcccaacagcaaagctcgttccgcgaccacattcgtatcggccgtgagctcaataagccggtgatcgtccatacccgtgacgcgcgtgccgatactctggctattttgcgcgaagaaaaggtgacggattgcggtggcgtactacactgtttcactgaggacagggagacagcgggcaagctgctcgatatggggttctatatctcgttttccggtatcgtcacttttcgtaacgccgagcagctgcgtgatgcggcgcgctacgtgccgctggatcgcctgctggttgaaaccgattcgccgtacctggcgccggtcccccaccgcggcaaagataaccagccggcgctggtccgtgacgttgccgagtatatggcggtactgaagggggtgtcgcttgagcagctggctcagcagaccaccgacaattttgccaccctgttccacatcgaccccgcccgtttgcaacctgcttgatctgcttattattttaaggctcgtaattaatagccaaagcgagtaaagttcaccgccacaaaagtggcggtgaaggttttttagcaacatctggatacaatttatgtaagttgatgtaaatttttaccggaaggctgattgaaacgtgatagccgtcaaacaatcatcccgttaattattttactctgtgtaataaataaagggcgcttagatgtcctgtccacggcacggttctccccccgggccaatgcgtgaaagcgtaaaaaagtaccaaatactcaggagcactctcaattatgtttaagaatgcatttgctaacctgcagaaggtcggtaaatcgctgatgctgccggtatccgtactgcctatcgcaggtatcctgctgggcgtcggttccgctaacttcagctggctgccagccgtggtctcccacgttatggcagaagcaggcggttcagttttcgccaatatgccgctgatcttcgctatcggtgtggccctcggcttcaccaataacgacggtgtatccgcactggctgcagtcgtggcttacggcatcatggtgaaaaccatggcggttgttgcgccgctggtgctgcatttacctgctgacgagattgcggcaaaacaccttgctgataccggcgtgcttggcggtattatctccggtgctatcgccgcctacatgttcaaccgcttctatcgcatcaagctgccagaatatctcggcttctttgcgggcaagcgttttgtgccgattatctctggtctggccgctatcttcaccggcgtgatcctctccttcatttggccgccgatcggctccgcgatccaaaccttctcccagtgggctgcttatcagaacccagtggtggcgtttggtatctacggtttcatcgaacgttgcctggtgccgtttggtctgcatcacatctggaacgttcctttccagatgcagatcggcgaatacaccaacgcggctggtcaggtgttccacggcgatatcccgcgctacatggcaggcgacccgacggcgggcaaactgtctggcggcttcctgttcaaaatgtatggtctgccggcagcggctatcgctatttggcactctgctaaaccggaaaaccgcgccaaagtgggcggtatcatgatctccgccgcgctgacctcgttcctgaccggtatcaccgagccgatcgagttctcgttcatgttcgtggcgccgatcctgtacgttatccatgccattctggcgggcctggcgttcccgatctgtatcctgctgggtatgcgtgacggtacctcgttctctcacggcctgatcgactttatcgtgctgtccggtaacagcagcaaactgtggctgttcccgattgttggtatctgctatgcgatcgtgtactacgtcattttccgtgtgctgattaaagccctggatctgaaaacaccgggtcgtgaagacaccaccgaagagagcaaagctggcgccaccagcgagatggctccggctctggtcgccgctttcggcggtaaagagaacatcaccaacctcgacgcatgtattactcgtctgcgtgttagcgtggcggatgtagcgaaagttgaccaggctggcctgaaaaaactgggcgccgctggcgtggtagtggcaggttctggcgtacaggccatcttcggtaccaagtccgataacctgaaaactgaaatggatgagtacatccgtaacagttaagacgtagtatcggggagactaaggcagccaactggctgccttttttatgcgctaaagtcggtgccccacaagcgataaccctgaaaacagtccgccatatgcttattccctcagcagctaagtctatagttgaataagaaaaagagctttcaggttgaaagagagggagaatgtcgctcatactcttagcggaacctgtgcgtccgcgtttatctgcagaagcaggccagcgcacgggataaaacttataaggaatcagtcatggcagaagaaacgattttcagcaaaatcattcgccgggagatcccgtcggatattgtctatcaggatgagcttgtgaccgcttttcgcgacatctccccgcaggcgcccacccatattctgattgtcccgaatgttctgattcctaccgtaaatgacgtcaccgctgaacatgagctggcgctgggccggatgatgaccgtcgcggcgaagatcgcccgcgatgaaggtcttgccgacgatggctatcggttgatcgtcaactgcaaccgccacggcggccaggaagtgtaccatatccatatgcatctgctgggcggtcgtccgcttggcccgatgctggcgcacaaaggctaacgtcatgctcaggacccttttgggcgcgtgtctggcggcggggctactcgccgggtgtagttcacacccggagatcccggtttctgaccagcaggcgctggtgatggagtcgagcgtgctggcggcggggatcagcgccagcgagcctgccgtcgtggcgacagagattcaggctaccgcctcctcaacgctatataacgagcgccagcagccggttaccgtgcactatcgttttttctggtatgacgcccgagggctggagatgcatccgctggacgcgccgcgcaccatcgtggtaccggcccgctcctcggtcacgttatatggcagcgccaatatcctgggggcgcataaggcccgcctttatctttatctgtaaggggtaattataatgatgaaaatgtgtcgctatgcgttaatcacagcactggcgatattcctcgcaggctgtgcggggttgcgggagcagcccgcgccggtagaagaggccaaaccgcagccgcagcagcctgcgcagccgcagcccacggtgccgaccgtaccggcggtgccctctgtcccggcgcagcctgggccgattgagcatcaggatcagcagtcgggtcagccggcgccgcgcgtgcgtcattatgactggaacggcgcggttcagccgctggtggggcagatgctgcaggcgagtggggtcaatgccggcagtattctgctggttgacagcgtgaacaaccgcaccaacggttcgctgaatgctggagaagccaccactgcgctacgtagtgcgctggccggtaacggcaaatttaccctggtatcggcgcagcagctggcggtcgccaagcagcagctgggcctgtcgccgcaggacagccttggcagccgcagcaaagccatgggcatcgcccgcaacgtgggcgcgcagtatgtgctttactccaatgccaccggcaacgtcaacgcgcctgagctgaaaatgcagctcatgctggtgcaaaccggtgagataatctggtcaggtaaaggtgctgttcagcaacaataagctaacgcgcgacgagctcttgtcgcgcttctttccccattatcatcctgtcgcctcgctgagccagagtggcctcagcggcggcagtgtgattatcagcgacggcgaccggcggcacgtgctgcgtcagccgcacgatccgtctgccgccacttaccattttcgccgtcagtatcacgcactccgccgactgcctgccaggctggcgccaaccccgctgttttactcaccctgctggttggtggtggagtattgcgcaggggaggtgaaaagcgagttaccggcctccccgcagctgtcaggcttattgtatgatttgcatcagcaaccgcggtttggctggcgggttagcctcacaccactgctggcccagtactggcagaggtgcgatccggcgcggcgcaagccgcgttggctgcgctggcatcagcggctgcgccgccagggcgagccccgtcccctgcggctggcgccgctgcacatggacgtccatgccggcaatattattcataatgagtccggcctgaggctgatcgactgggaatatgccggcgatggcgatatcgcgctggagctggccgcggtgtggatcacgcctggcgagcgccgtcggctggtagaagcgtatgcccggcgggcggccatcgacgcgcagcagctatggcggcaggtggcgcgctggcgcccgtgggtactgctgctgatggcgggctggtatgaaatgcgctggcggcagagcggggaccggcaatttatcacgctggcagatgaaatatggtgtcagttagacaacgaacgtaaaggataagagaggtcagtgtgggcccagtgatgttggatgtcgaagggtatgagctggatgcggaagagcgagaaattctggcgcatccgctggtgggagggttgatcctctttacccgaaattatcacgatccggcgcagctgcgcgagctggtgcgccagatccgcgacgcctcccggaaccacctggtggtggcggtcgatcaggaaggggggcgggttcagcgtttccgcgaagggtttacccgtttaccggcggcccagtctttcgccgcgctgctggggatggaagaggggggcaaactggccgccgaagccggctggctgatggccagcgaaatgatcgccatggatatcgatattagttttgcgccagtgctggacgtcggccatatcagcgccgcaatcggcgaacgttcttatcatgaagatccgcagaaagcgctgacgatggcgcgtcacttcattgacgggatgcacgccgcgggcatgaaaaccaccggcaaacacttcccgggacacggggcggtgactgccgattcgcacaaagagacgccgttcgatccgcgggcggcatcggttatccgcgaccatgatatggcggtgttcaaaagccttatcgccgagcagcgtctggacgccattatgccggcgcatgtgatttacccggagctcgatccgcgtccggccagcggctcggcgtactggctgaaaacggtgctgcgcggcgaactgggctttgacggggtgattttctccgacgatctgtcgatggaaggggcggcgatcatgggcagctatgccgaacgcggtcaggcatcgctcgacgccggttgcgatatgatcctcgtctgcaataatcgtaaaggcgcggtcagtgtgctggataacctgtcgccgatcaaagcagagcgtgttacgaaattgtatcataaaggttccttttcccgtcaggagttaagggattcagcccgttggaaaacggtgagtgcccagctggagcagcttcatgcgcgctggcaagaggcgaagtccgcgtaacgctctacggggcgttgttgtctggtgaggatgcgatgattatctatttacacggttttgactcgaacagccccggtaaccatgagaaggtgatgcagctgcagtttatcgacccggacgtgcggttgattagctacagcacgcggcatcccaagcacgatatgcagcatttgctgaaagaggtcgataaaatgctgcagctcactgccgatgaccggccgctgatctgcggcgtcggccttggcggctactgggcggagcggattggttttctgtgcgatatccgccaggcggtgttcaatccaaacctgtttccgcatgagaacatggaaggcaaaatcgaccgaccggaagagtatgctgacatcgccaccaagtgcgtgaccaacttccgcgagaagaaccgcgatcgctgcctggtggtgctttcccgccaggacgaggcgttggacagccagcgttccgccgatctcctgcaccactattatgaaattatctgggatgaagagcagacccataagtttaaaaatatctcgccgcatctgcagcggctgaaagcgtttaaaaccctcggctaactgctttcccttgttcccaaacccgcgtcgggttcaccacgcgggttttttcatgtctacacttattggtttcgctgaaaaaatacgcgacaaaacttgatgcacatcaattttggtatgaccaatgcaccgttcatggtattctcgacagtgctgaatggtttcattaacgtaacttgttgttaaataaaggctatttcaataacttttatttaacaattggttaataattttaggggtacacatgactacgccattgaaaaaaatcgtaattgtgggtggcggcgctggcggactggaactggcaactcagctggggagaaagttagggcgccataagaaagcgaaaatcaccctggtggaccgtaaccacagccatctgtggaagccgctgctgcacgaagtggccaccggttctctggatgaaggcgttgatgcgctgagctatctggcccatgcccgcaaccacggtttccagttccagctgggctcggtggttgatatcaaccgcgaagggaaaaccatcaccctcggcgagctgcgcaatgaaaaaggcgagctgctggtggctgagcgtaaactgccgtacgacacgctggtcatggcgttgggcagtacctcgaatgactttaatacccctggcgtaaaagagaactgcattttcctcgacaacccgcaccaggcgcgtcgcttccatcaggaaatgctcaacctgttccttaaatactctgctaacctcggcgctaacggtaaagtaaatatcgccatcgtcggcggcggcgccaccggcgtggagctctccgctgagttgcacaatgcggtgaaacagctgcacagctacggctacaaagggctgaccaacgaagcgctgaacgtcacgctggtcgaggcgggcgagcgcattctgcctgcgctgccgccgcgcatttccggggcagcgcataatgagctgactaagctgggcgtacgggttctgacgcagaccatggtcaccagcgcggatgcgggcggcctgcacactaaagatggcgaatatattgaggcggatctaatggtctgggcggcggggatcaaagcgccagatttcatgaaagagatcggcggcctcgaaaccaaccgtatcaatcagctggtggtcgagccgacgctgcagactacccgcgatgcggatattttcgccatcggcgactgcgcctcctgcgcccgtccggaaggcggctttgtgcctccgcgggcccaggcggcgcaccagatggctacctgcgcgctgaacaacatcctggcgcagatgaaaggcaaaccgctgaaggcatacacctataaagaccatggctcgctggtgtcgctgtcaaattactccaccgtcggcagcctgatgggtaacctgatgcgcggttcgatgatggtggaagggcgcattgcgcgcttcgtgtatatctccctgtaccgtatgcaccagattgctctgcatggttacttcaagaccggcctgatgatgctggtcgggcgcatcaaccgcatcattcgcccgcgcctgaagctgcactaatcgctgtcgcgacccggaggcgcgctctgagggcgcctccgggctcttctgctggaaccgcagagatcccgctcggaatcctctgaatccctttgatttgcagcgaattctcgcacttttcatccgctatctgatttgcgccctcccggctccggttgcaaaattgtatcaacagcaacaaaggaggaactcccgtgaataaatctatgttggcgggtatagggataggcgtggctgccgcgctgggcgttgcagctgtcgctggtctcaacgtgttggatcgcggcccgcagtatgcgcaagtggtctccagtacaccgattaaagaaaccgtgaaaacgccgcgtcaggaatgccgcaatgtcacggtgactcatcgtcgtccggtacaggatgaaaaccgcatcgccggttcggtgctgggcgcggtggcgggcggggtgattggccaccagtttggcggcggtcacggacgcagcgtggcgacggttgtaggtgcgctgggcggcggctatgcaggcaaccagatccagggcgcgatgcaggacaacgatacctacaccaccacccagcagcgctgcaaaacggtgtatgataaatccgataaaatgctcggctacgatgtgacctataagataggcgatcagcaggggaaaatccgcatggatcacgatcccggcagccagatcccgctggacaacaacggccagctggtcctgaacaacaaaatctaaaaacagatttgtgtagtgattagcccctcaatcgctcaggctgaggggctttttttatcagaaggttaaggcgtagttcagaccaaaggtgcggccacgacctttgtactcatacagcgatgaactgccgtaggttgggctgtagagcagcggcgcgcgctggccccatatagtcacatagtcttcgttaagcaggttttcgatactgaaggtcagtttccccaccggcagcgcgtaactaccgataaaatcgacggtgttatagccttccagcttgttgccggcggcatcgctgaggtcaaatacctgctgactctgcacgcgcaggctccacggatccggcgcccagcccacccaggcggtggctttagacggcgaggcgagggtgacgtcccatttttgccagcggccgtcggtctgcacctgggatttcagcacgttgaagttaccgccgacgctccagtcgctatccggaataaagtagtcgaccgccccctcaacgccgtaaatacgccgtttgtcggactgaacgtcgatggtcatgtcggtgcggttgacgacaatggtcttatctgaggtcgagtagtacgccgccagctgggtgcgcaggttatcgccggtgtagcgccagcccagctcgtacgagttaactttgatcccctgcagcggcgagtcatcgacgttgacgctggagatcagcggcagatgaccattcaccgcagcgccatatttaccgatgccatagtatttaccagggtccggtagctcgacgccctgcgagaagttaaaccaggtttgttgacgctcggtcaggtgggccacgatcccggcgttaaacaggaagttatcgtaatcggttttgccgcctttgatggcgtcggcggagcgcgctttgccgttggcgatatcctgctgctgggcgtagccgacaaagtcgtcgacccggttttcggtccactggtagcgtaccccgccgctgacggtaaagatatcgttcagatcgtagctggactgcaggaatggcgcgacattggaaatactgtatcccgggtagcggccggttgtgtagatcgattcgttgtgcaacccgccggaggccatcgattgtggcagatcgaagaacatttggttggcattaaaggtctcatgatcggcgtcgagaccccaggtgagatcccaccccgccagcggttggctgttgagggtcagcttggccccatactgatcggtatcctgctgcgacgaggagaagctactgacctgacctttcgtgagcgtcgggaacggatagaaggtgagggactcatcgcgatagtacacctggctcaccagattctggccgaaaaagtcggcatcagagtactggaggctgatcagatggcgttcggtgccggggatacggtcggaattgagcccgtcggtggtatacgctttgccgccgctggtgaccgcggacatgttcttcccgagccacagaccgtagtcatcatcgccctggcttttataatactgggtgaccaactgcagctggcggttattatcgatctcaatcgtccccgtccccatcacgtcgaggcggtcagaatgctggagccccgtttgggtattatcgaggatcagcgcatcgttattgccgtcgtaccagccgccgaaacgctgataggctaccgacaagcggccggatgcgtggtctgttccgccgctgacggccgccgcgacgcgctcatcatgatcgttgctgttcgcaaaaccgctcttgcctcccacctcaagatcgacctgacgatcctgctgcccctttttggtaacgatgttgataagcccgccggtactgcccccgccgtacagcgaggtcgctccggagatcacttcgatatgttcgatgttgaatggatcgatggcgtcgagctggcggctgtcggtgcgtgaggagttgagccggacgccgtcaatcagcacgacgatcgcgcgcccgcgcatgttcatcccatagttggtccgcccctggctgctgacgtcgatgccggggatcagctgcgccagcacgtctttgaactctttcccgccctggacctgctgctcaatctcctggccctcaatgacccaggtggtttgggccatttcggccacggtgcgatgggtgcggtttgcgctaacgatgatgctgtcttcatcagactgagccgccagcgcaggcagcgtgctggccagcagcagagggtggagcacccagaggcgctttttcatatccattccttttatgagcaagttgctttgtcgttgttatgggtcggcgtcggccggtattcgttacaatgcgaaacatctggaaaaactcaaaaaaggattttgcacataatgaatatcgcaatcaatatcatttgcgtttatcttgcgcgagaaaaggtaataaaaatcaatctattttgtggggataaagccaacaggagagcggatccggcggcagaataccgccggaagcagggcgcatcaggactcgaggacctgcggccagagacggagagtggtgtcggtgatttgcatcagcttgtcgaaatccgcaccttcccgggcgctaatcgacatcccctgcagaacgcagttaagaaattgcgccagctgcgcgacatcgcggcccgcgggcagttcgccctgcgcctgccgctgctgcagaaactgggttagcgcctgctcctgcatcgcatggcgggatttgatggtattggcgatatccgtcgaggaggcggccagcgcggcggaggtattgatgataaagcagccggccggcgtctctttgctggtaaagcaggtggcgaccgccgtgaagtagtcacgcaacgcgcgatcgacggattttccctcggcaaacagcacggcttcgtgcttcgcggcaaagcgcgaaatgtaacgatccaacactgcgcggaataggccttctttattcacaaattccgcatacagggtgggggcttttgctcctgtcgcctcgaccagatcggcgagcgaggtcgcctcatagccgtgctgccagaagagtgtcatggctttgtccagcgccgcatccctgtcgaacaccttcggtcggccacggctttttttggcgcaactttgaacgtcagttgtcatggtgccgttgtacctatgttggtttggtgaaaggccattataaaaataaacgatcgccggggccagcgctgtcggtttaaaaataaataattcatatatgtatgaaatttaagcattttataaatagttaaacgatcgttataaaaatgcattgacgtgtgacatagatcacattattatttacctatcgatcgttaagttaatgcttgcgaccctactataaaattcatctgcacaggtataataatcatgaaaaccgttaatactctggcttttgccgccgttttaagttccctttctttcgccagctttgccgctgtagaggtgcagtccacccctgcaggacagcataaagtaggcaccatctctgcttctgccgggactaacctgggctcgctggaagaccagctggcgcagaaagcggatgagatgggcgccacttcataccgtattacttcggtaaccggtccgaatacccttcacggtaccgccgttatctacaagtaagcccgatgcgtcgctgcccggcccccttcaccggacggcgatgagtaagaccctgttgtacccctgtttgacccttgccaacaaaaaacccgccatcaggcgggttttttgttttatgcagcgtaagactacagcgactgcggtccaggttcagcatgacgggtgacgtcaatcggcatgcccgagcggtaattcatcgcgcgctccatcaccgtcccgtcggtctgcggcgcctgtttgaacgcagtcatggccgcattaagcgtaatgggcagggtctgcgggtcgtcatcgatatgctcagacagcggctgatggacctcaaccagacggcggccatccggctcaaccgacgccttgatcggcgtgttgataatgttcaccttcgtgcccggcgagatagtgttgtacagcgccttgatatcgttatcgcgcagacgaatgcagccggaactgacgcgcataccgatgccgaaatcggcattggtgccgtgcaggagatagactccgccataggcggcgaggcggatggcatgatggcccatcggattgtcaggaccagcaggcactaccgccggcagctcaatccccatagccttgtagcgcgcgcgaatgttggcggtaggtgtccaggtcggattggcccgtttgtcggacacggttgtgaccatcgtcggtgtgatggtggtcccacccagctggccgatgccgattgggtagacggtcacttcattcttgcccggcgggtaatagtagaggcgcagttcggcgaggttaatcaccaacccttcgcgcggcgcatcgggcagcagcgtctgcagggggatggtcagcacgctgccggcgcgcggaacataggggtcaactccgggattggcctgcagcagggccaggaagccgacattgtacttcttggcaatcgcttccagcgaaccgccgtcatcctgtaccacatggaactgattctgacccaccagccggctgcccggcgggggaaggggccaggtgttagcgcgcgcggggagggccagcgcggcgactaacgcgactagcgtcagccaaagcgtcacggggaaacggtttctcattaccataactccaaaatatgtaagtggttatttttatacgaaaagcagatgagattatggcgtgagtctgtgtggggaaatccaggcggattgcaaaatgtttgtaaagattgccagatatgtgggaaaggagatacggcagcggggccgtatctcctgccagtcaggcgacggcgttctcttccagctggcgcataaactggcgaacccagtccatccgcgttttacgctcttccaggtcctgcatgaatttcaggcgcgtcggcccgtccaggcggaagtgctggggctgcttctgcagcaggccgatcagccacaccggattgacgttgtttttctcgttaaattcgatcacgccgcctttctcgttgctttccagtttgcggatccctaacttttgcgcctgctgacgcagacgggcgatatccagcaggttgcgggcggcatcgggcaggcggccaaaacgatcgatcagctcgactttgatctcctccagatcctgttcgtttttggcgctggcaatgcgcttatagaatgacaggcgcgtattgacgtcagggatgaaatcatcaggcagcagggaaggcatgcgcagttcaacctccgtctgctgactggtgagatcttccagcgagggttcacgcccggctttcagcgcatcgactgcgttctccagcagctccatatacagggagaaaccgatggtttccatctgaccgctctgatcttccccaagcagttccccggccccgcgaatctccagatcgtgggttgccagcgcaaagccggcgccgagatcttccagcgacgcaatggcctcgaggcgcttttgcgcatcggtggtcatcgctttcggatgcggcgtcagcagccaggcataggcctggtgatgcgaacggccaacgcggccgcgcagttggtgcagctgggcgaggccaaaatggtcggcgcgttcgatgatgatggtgttggcggtgggaatgtcgatcccggtttcgatgatggtggtgcacaccagcacattgaagcgttgatgatggaagtcattcatcacccgctccagttcgcgctccctcatctgaccgtgaccgatggcgatccgcgcctccggcaccagctccgccagcttgtcggcggctttctggatgttctcaacgtcattaaacagatagtagacctggccgccgcgcagcgtttcgcgcaggatcgcctcgcgcaccaccagggcgtcatattcgcgaacgaaggtcttcaccgccaggcggcgcgccggcggcgtggcgatgatcgacagatcgcgcatcccgctcatcgccatgttcagcgtccgcgggatcggcgtggcggtgagggtcagaatatcgacatcggcgcgcatcgctttgatgcgctctttatgccgcacgccaaaccggtgctcttcgtcgacgatcagcagcccgagatcgcgcagcttcacctcgctctgcagcagcttgtgggtgccgatcaagatatcgattttgccttccgcggcctgctcgaggatctgcgcctgctctttagcgctgcggaagcgggagagcatttcgatgcgtaccggccagttggcgaaacgatcgcggaaattgtcatagtgctgctgagccagcagggtggtcggcaccagcaccgccacctgcttgtggttctccacggcgaggaaggcggcgcgcatggccacttcggtcttgccgaagcccacatcgccgcataccaggcggtccatggccagcggctggcacatatcgctgaggacggcgttgatcgcctgcgcctgatccggcgtggtttcaaatgggaagccgtcgcagaatagctgatactgttcgcggtcgtgtttaaaggcaaaacccgccttcgccgcgcgctgggcatagatatccagcagctcggccgccacgtcgcgtactttctcagccgctttttgtcgcgcccgggtccaggcatcgccgcccagcttgtgcaggggggcgttttcttccgccccgccggcgtagcggctgataagatgcagggacgataccggaacgtatagcttggcatcgttggcgtaggtcagcatcagatattcgccggtgatgccgccggcttccagggtagtcatgcccgcgtagcggcccacgccgtgttccaggtgaacgaccggctggccgatatgcagttcggcgaggttgcgaatcagagtgtcagggttaatggtgcgtcgcgaatcctgacgacggcgcgccacccgctcgccgagcaggtcgctctcgcaaatcagcgccaggccgcgctggctgtcgataaacccgtgctcggcggcgccaatcatcagatagcggccgttgccggtggcttcctccagacgcagcacatgttttggcgcaactttaatccgcgccagcatttcgctcagcgcttcacggcggccttcgctttccaccgagaagatcaccggaccggtaaatgactcgaggaagcggcgcagattatccagcggcgctttgttctgcgcctggacggcgaggtccggcagcgtctggtagcccagattagtatttgccgctttgtccgccagacgttcggttttcagctgcacgcgcggccattttttcagttcgctgaatagctcatcgctgcgcagccacagcagctcaggcggcaggagcgggcgcatcgggtcgacgccgcggttttcaaagcgggcgcgggcttcattctggaatcgttccgcgctggcctcgagatcgccggtgttgacgatcagcgtgctggccgggaaatagctgaataacggcggcagcggctcgctgaagaacagcggttgccagtattcgataccggcaggtagcgtccctttactgacctgctgatagatgtgctcggcatcgcgcttcacctcaaagcggtcgcgccactggctgcggaacagctcaatagcggtctggtcggtggggaactcgtgcgccggcagcaggttaatggccgccacttcctccagcgtgcgctggctgtcaacgtcgaacaggcgcaggctgtcgatttcatcgtcaaagaaatcaaggcggtagggctgatcgctacccatcgggaacaggtcgagcagcgcgccgcgggtagcatattcgccgtgctccatcacctgatcgacatggcggtagccggccccctccagctgatcgcgcagcgcatcgcgcgacaggcgctggccctttttcatcaccagcgcgtggccgtgaaggaagctgtgcggacagacgcgctgcatcagggtgctgaccgggacgatcagtacgccgcgctgcatggtgggtaactggtaaagggtggcaagacgggaggagatgatgtcctgatgcggcgagaagctgtcgtaagggagcgtttcccagtccgccaaccccatcaccatgctgtcggtgaactgcctgatctcgtcgttcagacgcagcgcgttttgcatgtcaggcgccaccagcaccaccgggcccttgtggcgttcggccatctccgccaccaaagtggcgcaggctgcgccggtcaactcgccaagctggcgctgatcgccggctttgaccggcaatgagtatcgatattgttcaggcatagacggtttcatgatttcttagggattcgctctgccgatatggagggcaactcgctgatattcaatagtgagattatccgcgattggtctggattcgccaacccgaattgccatcgcgtattgggtgaagaaaggtcagcgctgtcgataagcgtaaagataaataagtaagtacttatctatccgtttgtatttacttggtttttagggttattgctaataaagtcgtcatgtatcagtcgtttacgctgcctctaatcgcttatatactcgggcatcggctatcagcaaccagatggatgacatgtaccaacctgccgcactctttatcggcctacgctatatgcgcgggcgcgcagccgaccgcttcggtcgtttcgtctcctggctctcaactatcggtattacgcttggcgtaatggcgctggtgacggtcctgtcggtgatgaacggctttgaacgcgagctgcaaaacaacatcctggggctgatgccacaggccattcttagcgccaaacagggttcggtgaaccctcagcaactgccggagcgcgaagcgaaacttaatggggtaacccgcgtagcgccgatcaccaccggcgacgtggtgctgcagagcgcgcgcagcgtggcggtcggggttatgctgggcattgatccggcgcagaacgatcccctgactccatacctggtgaacgtcaaacagagcgatctgcaggcgggaaaatataacgttattctcggcgagcaactggcgggccagctgggggttaatcgcggcgataaaattcgcgtgatggttccttccgcgagtcagtttacgccgatgggccgcgtgccgagccagcgtctgttcacggtcatcggcaccttcgccgccaacagcgaagtcgatggctatcagatgctgaccaacatcgacgacgcctcccgtctgatgcgctatccgctggggaatatcaccggctggcgcctgtggctggataaaccgctgcaggtcgacaccctgagtcagcagacgctgccgccgggaactcagtggcaggactggcgcgagcgcaaaggcgaactgttccaggcggtgcgcatggagaaaaatatgatgggcctgctgctgagcctgatcgtcgccgtcgcggccttcaacattattacctcgctggggatgatggtgatggagaagcagggcgaagtggcgatcctccagacccaggggctgacgccgaggcagattatggccgtctttatggtgcagggggccagcgccgggatcgtcggcgcgctgctgggagcggtgcttggcgccctgttggccagccagctgaataatttaatgccgatcatcggcgccttccttgacggcgcggcgctgccggtggcgattgagccgctgcaggtcattgttatcgccctggtggcgatggtgctggccctgttgtctacgttgtacccttcctggcgcgctgccgccacccaacccgctgaggctttacgttatgaataagatcctgctgcaatgcgacaacctgtgcaaacgctatcaggaaggcaatgtgcaaaccgatgtcctgcacaatgtcagcttcagcattggtgaaggcgagatgatggctatcgtcggcacctccggctctggcaaaagtacgctgctgcatctgctcggcggcctggatacgcccacctctggcgacgtgattttctccggtcagccgatgagcaagctatccaccgccgcgcgcgccgacctgcgtaaccgcgagctgggctttatctatcagttccaccatctgctgccggactttagcgcactggaaaacgtggcgatgccgctgctgattggcaaaaagaagccggcggatattgaacgccaggcgaaagcgatgctgcaggcggtcgggcttgaacaccgcagccatcaccgtccgtcggagctctccggcggcgagcgccagcgggtggcgattgcccgcgcgctggtgaataaaccgcggctggtgctggcggacgagccaaccggtaacctcgacgctcgcaacgccgacagcatcttccagctgctgggcgaactgaacgtcgcgcagcgcaccgcgtttctggtggtgacccacgacctgcagctggcgaagcgcatgagccgccagctggagatgcgcgatggccgtctgaccgccgacctgaccctgatgggggccgagtaatggcgtctccgttatcgttactgattgcattgcgtttcagccgcggccggcggcgcggcggcatggtgtcgctgatctcggtgatctccaccatcggcattgcgctgggggtggcggtgctgatcgtcggcctcagcgcgatgaacggctttgagcgcgagctgaataaccgcgtgctggcggtggtaccgcatggcgagatcgaacccgtgaatcagccgtggaataactggcaggaagcgctggcgaaggtgcagaaggtgaaggggattgtcgcggcagcgccctatattaacttcaccggcctggtggagagcggcagcaatatgcgcgccatccaggtgaaaggcgtcgacccgcagcaggagagccagctcagcgcgctgcctacctttgtgcagaataacgcgtgggccggattcaaggctggcgaacagcaagtgatcctgggcaaaggggtcgccgatgccctgcacgtgaagcagggggactgggtgtcgatcatgatccctaatgccgacgccgaccatcagctgctgcagccaaaacgcgtcaggctgcatgtgaccggaattttacagctgagcggccagctcgatcatagttttgccatgatcccgatgcaggatgcgcagcagtatctggagatgggcggcagcgtgaccggcatcgccatcaaggtcaccgacgttttccatgctaacaagctggtacgcgacgccggcgaggtgaccaacagctacgtctacatcaagagctggatcggcacctatggctatatgtatcgcgacatccagatgatccgcgccattatgtacctggcgatggtgctggtgatcggcgtggcctgctttaacatcgtctcgacgctggtgatggcggtcaaagacaaaagcggcgatattgcggtgctgcgcacgcttggcgcaaaagacggcttaattcgcgcgattttcgtgtggtatggtttattagccggatcggtaggcagcctgtttggggtggtgatcggcgtgatctgcgcgttgaacctgacgtcgatcatcaacggcatcgaatacctgattgggcataaattcctctccggcgacatctattttattgacttcctgccgtcagaattgcactggctggacgtcttttatgtgctggtgacagcactgttgctgagtttgctggccagctggtatcccgcccgccgcgccagccgcatcgacccggcgagggtgctgagtggccagtaatttatcgtcatcgtcggcctggctgacgacacaagaggaattgctgaaatgtattatggatttgacattggcggcagcaagatagcgctgggcgtatttaatcaggagcggcgactgcagtgggaaaaacgcgtcgccacgccgaaaagtagttatgaggattttctccaggcggtagaggcgctggtccgcgaggccgatgagcgcttcgaccagcagggttcggtggggatcggtattccgggaatgccggaaacggcggacggcacgctgtatgccgctaacgtgccagccgccagcggccggccgctgcgtgctgacctcagcgcgcggttggggcgcgaggtgcgtctcgataatgacgccaactgtttcgcgctgtcggaagcgtgggacgatgagtttacgcaatacccgctggtgatgggattgatcctcggcaccggcgtgggcggcggcctggtgttgaacggtaaatcgattaccggccatagctatatcaccggcgagttcggtcatattcgcctgccggtggatgccctggaggtggttgggcgcgattttccgctgctgcgctgcggctgcggccagctgggctgtattgaaaattatctctccggtcgcggtttcgcctggctgtacgaacatttttatcagcaaccgctctcctcgccggagattgtggcgcagtggcagcagcacgatccgcgcgcgcaggcgcacgttgagcgctatctcgatctgctggcggtgtgtctggggaatatactgaccattgtcgacccggatttgctggtgctcggcggtggattatctaactttacggccattagcgaagggctggcgcaacgattgccgcgccatcttctgccggtcgccagggttccgcgcattgagcgcgcgcgccacggcgatgccgggggaatgcgcggtgcggccttccttcacctgacccattaatcacagaggtagctatgcagtcgcgccgtttacatcgattgagccgttttcgtcgcaataaacgtcggttgcgtgaccgtctgcgtcagcggattttctttagggaggacaggatgaagcctgaagcgatggcaaaaccgagagtggtggtgttaaccggcgcgggcatctcggcagagtcggggatcaaaaccttccgcgcggccgatggcctgtgggaagagcatcgggtggaagatgtggcgacgccggaaggcttcgcccgcgatccggcgctggtgcaggcgttctacaacgcccgtcgtcgtcagctgcagagtccggaaatcgcgccgaacgcggcgcatctggcgctggcgcgtctggaggatctgctgggcgaccattttctgctggtcacccagaatattgataatctgcacgagcgcgccggcaaccgccgggtgatccatatgcacggcgagctgctaaaggtgcgctgttcgtggagcggccaggtgctggagtggaccggcgacgtcaccgccgaggacaagtgccactgctgccagttcccggcggcgctgcgtccgcacgtggtctggtttggcgaaatgccgctggggatggatgagatctacagcgcgctggccgacgcagatatttttatcgccatcggcacctccggccatgtctatccggcggctggctttgtgcacgaggcgcgactgcacggcgcccataccgttgaactgaacctggagcccagccaggtgggcagcgagtttgccgagaagcactacgggctggcaagcgaagtggtacccgcctttatcgataagctgctgtaggaaaacgcgctgtaaactgaagccgcctgccggtagccagggcgcagcccacggccgccggcagcgctgctgacaaggatgtcacgtcatgacaggagtcagaccatgcataatccgctggttatcgaagcgatcatgttgatcgcggccattatcgttggcgtctggagccagcgcgctttaccgctacatgtcgatagccgaccgatcctcttcctgctatgtctgttcctcggcactggcagcgcgttgtgcctgctgctggatatcttagctctgctgttgaccggtcaggtcgcgacgggcggtgtgcgaatatacggtccgttgctgctgctggtggtgctgtggaaacctctcaactgggttgtcggcatcattgaagattttgtgcagcggcgagccgaaaaagggaagggcaaaggccagcacgacggcggtcaacgctgatccgccgcctgcgccgtggcttatttatagcgccttttgcatattaatgaccgaacgggcgttcgaggcgctggtagccagcacatcgataaccccggtgcgtaatgcccccaggatcgctgtcgctttcgtactttcggaggcgatagcgatgacgcagggaatggcccgcagctgttcgagacttaagccaatgacccggtcattcatcaccgtatcgacgggtttgccctgaatattgaaaaagctgtaccccgccagatcgcccaccaccccctgttcctgacgcgcggtggcaatttcctgcggcgtaaaccagccgagctgcaccataaagctgttttcattcatatcgccgaggccgatgatcgccacgtcagctttgctggcctgttcgagcgtggccttaatcaggcggttttgcataaaggccgcgcgcagctccggggtttccacataggccggggcgtaaagcgtttcgctgaagccgttaaatttgcgcgccagattccggctgatgtggtcggcatcaatcagctgattgtcacgcttggttccgccgatgccgcagataaagcggcagtggcgctcaggaaacacgccaacgtgattcgccaccgcggccacattgcgcccctgaccaacggtgacggtcatatcgttttttaacaccccggcaaggtagttactgaccagggccgccacctgctggcgctgttcatcttcatcatggtgatccagggcaattagcgcgcgcttaatgccaaagtgcgaaataaactgctgctcaatctgggagctgaagaccggatggtatttgacgctgatctcaacaatcccttcctggcgcgcttttttcagcaggcgcccgactttgatacgcgaaatgccgaatcgtttggcgatctcttcctgcgtttgttcctgatcgtaataagccaccgcaatttcagtgagcagggcgtaatctgagtcttgttcaatcatggcctggaatttccatctctggtgtcccttttatattactgcgcctgcaaaataaattcctgtgtaacgcgttgaacaatgtcgcaatagccttgcgcgtcccaggccgcgcggccgataaacaacccattgatctcctgctggcgcagcaattccaccgcgttttgcagcgttacgctgccgccatagagcagcgggatacgggttcccgtctcgtgaccaaaccgctcgcaaagcgcctgacgtagcgcctgatgaatgacacccgcctcctgcggtgaggcgggcgtaccatgttcgccaatggcccacaccggttcatacgcaatcagggtccgcagcgcctgctggtggctcaggccatacagggcgatcttcatctgccgcaccacgctttcacgcgacacctgccagcgtttctcctcggcgctatcgccaatacagatcagcgggcgcaggccatgacctaaggcgctatgcacttttcgattaatcgcggcatcgctttcattaaaggcggcgcgtcgttctgaatgtcccagctcaacaagcgtggcgccggtttctgccaacatggccgccgagatttccccggtccaggcgccctgatccgcttcatgcatattctgcgcgccggtcagaagcggtaactgatgcgtttgcagaaaatggctgacgggttggatcgcggtgaaggggggaatgacgaagggctgaatagcagggtgacagccctccggcatccgcgctgccagcgtttcgcaccaggccatggcctgcgacagcggcttgttcattttccagctggttcctaaccatatcggggtcatcattgcttctcctcttaataaaatcaaatgcttgccagaaacggggccataccctgtattgaggttgaactttttatcactgcatgaacatatgttagatcacatttttcgatgaaaaaaatctatgaatttttttatgtgatcttcatcactcatggcggctcattcatcaggtaatgttttgagcatatgatttgatagtgaacatatgaacaatcaactgaaaaaatgagaggcgcatgatgtcagcagagaaaaaacccgttgtggcgattaccattggcgatccggcagggatcggcccggagatcaccgtggccaccatgatggacaaaagcgtgtatgacgagtgcaaaccgttcctgatcggctcggtaccgattatcagccgggcgatgaaaatcatgggctgcgattttgctatccataaaattgcccatccgcaggaggcccgttttagctgggggacgttggatgttctggaaactggcgactacgattgcgacagtatcgaatggggcaaggtgcagaaactggcggggcaaatgtcgctggactatgtgatgaagtcgatcgagctgggcaaagcggggctgatcgacgtggtctctactgcaccaattcataaggaagccatcaagctggcaggatgtaagctcccgggccataccgaaatctatcaggtggaaacccaatctgattacggtctgaccatgttccacgtccacaacctgcgcgtcttcttcgtgagccgtcatatggcgctaaaagcagcctgtgactatgccaacaaagcgcgagtgctggcctgcgttcagcagatccaccatgaatttaccgccctgaacatcaaaaatccgcgcattgccgtggccgccctgaacccgcatggctccgacaatggtctgtttggtcacgaagaggctgacaatctgatcccggcggtgaaagcggcccaggagatggggatcaacgctatcgggccggttccggccgattccgtgttccatctcggcaaacaggggcgctacgacgccattctctcgctgtatcacgatcaggggcatattgcctgcaaaaccctcgactttgaacgttcgatcaccattaccttcggcctgccgtttatgcgcagctccgtcgaccatgggacggcgtttgatatcgccggtaccggtaaggcgggtaccgtcagtatgctggagtcgacgctggtggcggcccgttactggaaaatgaagcatcaataatcgctgaggttcatgcgaatcacgaggacagagaaatggaaaaacatctgttgattagcaagggctgtaagggctggggcgggccgctgactatcacgccaggtcaggggaaaaagattgcgtacatcaccggggggatccgtcccccggtcgtcgaccgcctgagcgaactgaccggctggccttccattgatgtattcaagaatggcgaaccgccggcggaagagattggtttaatggtcatcgactgcggcggcacgttgcgctgcggactctatccgaagcggggaattcccaccattaacctgcatcccaccggtaaaagcggcccgctggcggaatttatacacgaagggatctacgtctccggcgtgacgccagcctgcattgagatggtctggccgcaaggggaaggcggaaagcttgggatcgtggctgacgatctgaccggggcaactaccgtcggggtgctgctggcgcgcagtggtttaaaaaccgccgcgtttttcgataccgaatccttcgcccgcaatgaggtagagtatccggcgatggtggtcagcagcgacagccgcccattgccgaaagcggaggcccagcacaaagtgagcgctgcggtgaaacagctgcaggctcgcggcgcgcattacttcaccaagcggattgataccacgctgcgcggcggcatcggatttgaaatcgacgccatgctggaacaactgccgcaggagacggtggcggttgtggtgccggcgatgccgcagtcacggcgtattctcgtcggcggttactcggtgattgattcggtagccctgtcgcggaccgatgtggctcgcgatgtacgtaccccggtcaccgagtcgtgggtaccgggactgttggcggcgcagacccatcatcaggtcgggcatatcgcgctgacatcggtgatgaaaggcgaagggcaaatccagcaggatttacaggaacaacaacagcgcggcgtgcgggtgatagtggtcgatgcgataaccgtcgacgatgtcgatgccatcgccggggcggtagtggccctgaactggaacgtgctgaccgtcgatccggggccctttaccgaacggctggcggttcgtcgcggcctgatgcgcgaagcgcggagcagcgcgcccgcgagcctgacagcggacggccagcgcggctcgattttgatcgttgccggcagcgcaacgccagtaaccaaaaaacagctccagtatttgatcgctaatgatgcccgggtctgccatatcccggtggatgccgagctgttggttgaccggaaaaacgccgctgagattgaagtcaatcgcgtggtgcagcatgcccgacagtgcgttccggcgcagcacaacgcgctctttgtttttgagtccgccttgaccgggcggttgctaaaccttcaggaagaggagcagcgatttggtctggcccacggtgaggctgcgcaaaatattaaccacggattgggcagtattgtgcgcgaggtgcttaactgtgcgtcgggtgaaattaaaggattgtatatgaccggtggtgacaccatggtcaatgtactaaaagagctgggcgccaccggaatagaaatgattgactatgtcatcccgcaaaccgatatggtgcggatcattggcggcgattatgccggcttaatttgcgtcgggaaaggagggctaaccggaccggaagatattattagcatcattgttgaccgaatttatcaggaagcacagcaataacccagtaatctaataactaataaacgacgtaatggtcgtcagggtagtattgcgtcgttatctctgttaaatcttaatttaagagttaccctatgaatattaatatacttgaaaaaatgaataaggtgcccggtgggttaattattattccactgctggtggctatattaattaatactttcgcgccccaggtgctcagcattggcggcccgaccaccgccttatttaaagtcggttccagcgccatgatgggcatatttttgctcatttgcggaacctcgatcaatatccgtcaggccgggttgccgctctataaaggcgccgtgctgctgtttctcaaatgtctggccggggcactggcggtgtgggttgcgggaacgttgtttggcccgagcggttttctcggaatatcgaccctggcgctgattgcctgcctgaccagctcgaacagctccctctatatcgcattgtgcagcaactatggcgatgccagtgatgccggggcgatctccgtattctgcatcaaggatggtccgtttgttaccatgatggtgctgggcgtcagcggcctggccaatattcccttcgccgcgctgctgtcgatgctgatcccactgctgattggcatgctgtggggcaatctggacgaacgctttaaacagttatgcgctgcggcgcagccgctggtgatcattattatgtcgttcgccatcggcgccaactccagtatcaatacggtgttcaccgccgggctgtccgggatcctgttggggattatctccgcgctaaccgggattgtgttctactttatctacaacctgtttttgaagaagaaaagcgcgctgggcgccgcgctgggaaccaccgccgccagctcggcgctgacgccggcgatggttgcccaggcggatccttcgctggcgatgtacgtggatgccgccaccgcgcagctggcgacggcgagcattatcaccatgatcaccgcgccgatactggtcgcctggtttgataaacggctgaaaaagcgtgcgccagccgctgaaccgctgaaagaggtgaaaagtgaagagagcgtgacattatcttcccctgccgccaaaggacacaaatagtatgagcgtgccgttgtattcattacggattaccgccgtcggggaatatgttgagtactctctgcaggagctgcggcttattttattctccgatgccgttcccgacgatattgcgagttattgcgctgtacaccaggccagcgaactgaccgccgagttatcgcctggtcagcaaatgaaattaaatgataaaaattatcgggtgaccgcggtaggccgtgtggcaacggcaaatttacgacagcttggccatatcacgctaaattttgatggcgcagatatcgctgaattacccgggacggtacacctttacggcgaaccaccacaaattattcagcctggcgaccaaatttcgttttacccgaattgtcattaagacgtactgttaaattaaggaaataaccatgaaaacaatcgctattggtgcggatgatgccgcctatgcttttcgcgattccatcgtcgcttatttgaatgggttgggaattaacgtcgcggattacagcagcgataaacgccaggggagtaccgtttatccggatgttgcccatgcggtggcgatgtcgattaaacagggcgaacacgagcgtgggatcctgatctgcggtaccggcattgggatgagtattgtggccaataaagtccccggggtccgcgccgcacagtgtcacgataccttctccgccgagcgagcgcgtaaaagtaacaacgcgcagattattacccttggcgcgcgggtgattggcgctgagctgggcaaaaaaattattcaggcgtggcttgagtccgaatatgaaggcggcggatccgcgcccaaagtggaacgtattgattattacgaacaccagcatgccagagattaatctccgcagtcgtaagataaggaacagatgatgagccagttagacgaactgaaaaaatacaccacggttgttgctgataccggcgatattgaatcgattaaaaagtttgcaccccaggatgcgaccaccaacccctcgctggtgctgaaggccgcgcagctgccgcagtatcagccgctgattgccgatgcgattggcaaggcacgccgccagggaggcagcgcagaaacgcaattgattaacgcctgcgatcaggtggcagtggatatcggcagcgaggtgctgcgccatgtgcccgggcgtatctccaccgaagtggatgcccgctttgcctgggatcgcgggatgtgcgtcgcgaaggcgcgcaagctcatccagttatatgagaaaaatggcattggtcccgagcggattttaattaagctcgccgccacctgggagggcattcgcgctgccgaagagctggagcagagcggtataaactgcaacctgacgctgctgttctctttcgctcaggcccgggcgtgcgccgaagcgggcgtctttctcatctcgccctttgtgggccgcatctacgactggtatcagaagcaccagccgcagtcagcctatcaggtggacagcgatccgggcgtggtctctgtgcgccagatttatcagtattacaaatcacatggctatgacacggtggtaatgggtgccagcttccgtcgtattgagcagatccaggcgctggcgggctgcgatcgcctgactatctctccggcactgctggacgagctggcggccagcgaaggagtgttgacccgccagttgacccccggctgcgtgacggaaacccgtcccagcccgatgacgcaggcggagttcctctggcagcatcatcaggatcccatggcagtggaaaaactagcggaagggatccgactgtttgctgtcgatcaggtgaaactggaacaacagattcagcagatgctgtaagccgcagggataaagactgatgaagacgacaaaaaccattcgctgccaatgcgccaacgcgctgcgcgccctgagcatggacgctgtacagaaagccaaatccggccacccgggggccccgatgggtatggctgacattgccgaagtgctgtggcgtgatttcctgaaccataacccgaacaatccggcctgggctgaccgtgaccgttttgtgttgtcaaatggccatggttcgatgctgatttacagcctgctgcacctcactggctacgatctgccgatatccgagctgaaaaacttccgccagctgcactccaaaaccccgggtcacccggaagtcggctacaccgcaggcgtggaaaccaccaccggtccgctgggccagggtatcgctaacgcggtcgggatggctatcgccgagaaaaccctggcggcgcagttcaaccgtccgggacacgatatcgtcgaccactacacctacgccttcatgggcgacggctgcatgatggaaggcatttctcacgaagtgtgctccctggccggtaccctgaaactgggtaaactggtggcgttctatgatgacaacggcatctccatcgacggccacgttgaaggctggttcaccgacgacaccgccaaacgctttgaagcctacggctggcacgtggtgcgcggcgtggacggtcacgacgctgacgccatcaaacgcgcggtagaagaagcgcgggcggtcaccgacaaaccgtccctgctgatgtgtaaaaccatcatcggtttcggttcgccgaacaaagccggtacccacgactcccacggcgcgccgctgggcgacgccgaaatcgccctgacccgcgaagcgctgggctggaaacacgcgccgtttgacatcccgtctgacatctatgcccagtgggatgccaaagaagccggccaggcgaaagaagccgcatggaacgagaagtttgcggcttacgccaaagccttcccgcaggaagcagccgaattcacccgccgtatgaaaggcgagatgccgtctgacttcgacgcgaaagctaacgagttcatcgcgaagctgcaggccaacccggcgaaaatcgccagccgtaaagcctcgcagaacgccatcgaagccttcggcccgctgctgccggaattcctcggcggctccgcagatctcgcgccgtccaacctgaccctgtggtccggctctaagccgatcaacgaagacgctgccgggaactacatccactacggcgtgcgcgagttcggtatgaccgctatcgccaacggtatcgcgctgcacggcggcttcctgccgtacacctccaccttcctgatgttcgtggaatacgcgcgtaacgcggtacgtatggccgcgctgatgaaacagcgtcaggtgatggtctacacccacgactcgatcggtctgggcgaagacggcccgactcaccagccggtagagcaggtggcttccctgcgcgtgaccccgaacatgtccacctggcgtccgtgtgaccaggttgaatccgcgattgcgtggaaatatggcgtggagcgtcaggacggcccgaccgcgctgatcctctcccgtcagaacctggcgcagcaggagcgtaccgcagagcagctggcgaacgtggcccgcggcggttatgtgctgaaagagtgcaccggctcgcagccggagctgatcttcatcgccaccggttcagaagtggagctggcggttgccgcatgggacaaactgactgccgaaggcgtgaaggcgcgcgtggtttccatgccgtccaccgacgcgttcgacaagcaggatgcggcttatcgcgaatccgtactgccgaaagccgtgaccgcgcgcgttgccgtggaagcgggtatcgctgactactggttcaaatacgttggcctgaacggcgctatcgttggcatgaccaccttcggtgagtctgcgccggctgagcagctgttcgaggagtacggcttcaccgtcgataacgtggttgctaaagcgaaagcgctgctgtaaatccccaccgctatcgcccggcccgaagtcgggcgatacgctctctgagtaatgatcttccggtcatgagtttgtcttttcctttctgaaccatttcccactctattttgtgcgtgaccgctgatttctgtacgtttttttgtgcagaccggcaaatgtagaccagattcaataggcgcccgcacgatcgcgccgcgcccctcgattccgccggacgtctgtaaaggagaccccgccatgccgtcaccgatgatttatcaggatctcaccactgccgcgctgctcggccatgcggcgcagtatcacagcgagaccgagattgtctcggtgagtactggcggtgagaaggagcgcagctgctggggggaggtggccagccgtgctcagcggctggcatcggcgctggcgtcgctggggctgccgccgggcgcccgctgcgccacgctggcatggaacaaccgccgccatctggagatctattttgccgtcgcctccggcggctgggtgacgcacactgtcaatccgcggctgtcggttgaccatctgcggtatatcctcaacgacgctgccgatgaagtgctgttttttgaccagacctttttgccgctggtagcgcagctgctgccgcagctgccgacggtgaaacacgtcgtgctgatggagtcccgcagcgaagcggcgctcagccagctgccctcattgctgttttatgacgatctgttgcagcaggggatggcagactatcgctggccgcagcttaatgaactgactccggcttcgctctgttacacctcgggaaccaccggccggccgaaaggggtattgaacacccatcgttcgctggtcctgcacgccctgagcggcaaccagccggacgccgccggcatatcggcgaaggacagcctgttgccggtggtgccgatgttccatgtcaacgcgtgggggacgccgtttatcgccgccatggtcggctcgcggctggtgctgccggggccgcacctcgatggcgacagcctgctgcagttgctggccgccgagaaggtgacggtggggtttggcgtgccggtgatctgggccggcttgctggcggcgatgcgccgggcagaggtccggctgcctgaatttaaacgtgcgctggtcggcggctccgcgctgccgccgtcgatggccgaggcctttcagcgtgattacggcattgcgctgacccacgcctggggaatgaccgaaacatcgcccatcggcaccatcaacacaccgttgagcaaacatgacgcgctcccggcacaggagcagcaaaagcagtgcgccggtcaggggcggcccattttcggcatcgaactgcaggtggtggacgtggatggcgaaccgttgccccgggatggtcaaagccaggggtatctgcaggtcagagggcactgggtggtagagcaatactatggtcaggacgcgagcgccctgaccgcggcaggctggtttgataccggtgatatcggtacgctcgacgccaatggttatctggtgatcagcgatcgggcaaaggatattatcaagtccggtggcgagtggatctccaccgttgagctggagaatatcgccatcgcgcatccgggggtgcgcagcgcagcggccatcgccgcccgccatccgcgctgggacgagcggccggtgctgctgtgcgtccgtgcggaagggggcgaagtggaggagaccgatctgctgagctggtttgagaagcgggtgcctaaatggcagatcccggaccgggtgatatttgtcgatgcgctgccggtcagcgccacgggtaaggtgctcaaaaatcagctgcgccaggcctacggagagattttaatgagtgagggaaaatgagccatgcgcgacccggtctgacgacctgttctcagtatgatgcggccctgcacgccttgtcggcggcgcgccagcgctgggcggaaacctcagtgaaccgtcgtctggcgctcctgcgccagatcaaggatgccctggccggcattgccccggcgtgggtggccgcggcagcggcggccaaagggttgccggcgggcgatccgctggcgagggaagagtggctggcgggcccctgcgcgctaatggtcggctgcaacgggcttatcgccaccctggagcaactggaggagaagacctttctgcggcggatcccgctgcggacgctggcggacggccgcctggcgctgcgggtggtgcccggcacgctctgggatcggctgcttctgtctggtgttcgcgctgagatatggatgcagccaggcgtcacccgggcccatctcgaccgctatgcggcgcgggcatacgacatcccgcctgccgcgcggcagggcaagctggcgctggtgcttggcgccggcaatgtggcctcgattgcgccactggatgtgctacacaagctgtttattgagaatcaggtctgcctgctgaagctcaatccggtgaatgattatctgcacgatctgctggcccaggccctggcgccgctgattgccatggatgcgctccgcatcgtcaccggcgacgcccgggcgggagcgtggctgaccacccatcccgctgtcgatgagatccatatcaccggctcccgcgagacccatgacgtcatcgtctggggcgagggtgaggcggctcgccagcgtcgggccgccgggacgccgctgaacccgcgtcgggtgacctcggagctgggcggcgtcagccccaccattatcgtacccgggccgtggagcgaggcggacatcgcttttcaggcgcagcagctggcgacgcagaagatgaacaacggcgggtttaactgcgtggccagccaggtgctgatcctgcagcaaggctgggagcctgcgacggccttgctgaatcagctgtaccgactgatcgccgcgaatacccgcccggactactaccccggcgctgaaaaccggctgacagactttcgcctgcgcgcccgtcagccgctggagatagcccgcggtgacgcgctgccgttgattgtggcgaataccgacgatgatcccgggttctgccagcaggaggtctttggcccggggctgtcggtcacccgtcttgaggccgatagtgcggaaagctttctgcgccaggcgatcggctatgcgaatcagcggctgcagggcacgctaggggccaatattgtgatccacccgcgcacccgcaaagcgattggacgtaagcgttttaatgcgctgatcgccgagctgcgctacggcacggtggcgatcaactgctggagcggggtggccttcctgttagccccttgcccgtggggggcgtttcccggccacacgctcgacgatattcagagcgggcggggcaaggtgcataacagctttatgctggagaaaaccgagcgcacggtgattgaggcgccgtttcggccgtttccgcgtagtctttggcatggcgaactgacgctgatgcccctgccgccctggttcatcacccaccgggggcaggaagcggtggcgcagcggctggtggatttttaccatcggccgcgctggcgcaaattgccggcgctcctctggcgcgcgctgcggggctaaggtgagagcaaaaaaaagggcggaaccgcggttccgccctgcgggattaacggcccgctttcagcttctggtaatactcttcataaatggcgctggcgctgccgacgtcattctgccattcgcctttctcaatggttgcggcgtccggatagagcgatttatcgttggccactgccgggctgagcatcttgcgcgccgcaaggttcggcgtcggataaccgatggtttcagcgacctgtttggcgacatccgggcgcagcaggaagttaatcagcttcagcgcgccgtcgacgtttttggcgttcgccgggatcgacaggctgtccatccagaagatgccgccctctttcggccagatcacttccagcggagtacctgcctggcgggcgacgtaagccgagccgttccataccatcccgaggttcacttcgccttccatatacgggttcgccgggttatcagagttaaacgctgcgacgttgggcatcagctttttcagctcgttataggcggcttcaatctctttcgggtcggtggtgttgccggaatagcccagcttacgcagcgccatctggaacacttcgcgcgcgtcgtcggtcagcagcaggctgcttttgtattccggcttccacaggtcggcccagctggtgatagttttcgggtcaatcgcctcgctgttgacgccgatggccgtcgccccccagatataggggatggagtagtcgttattcggatcgaacggtttattcagcatctgcggatcgaggttgctgaagttagtcagcttgctcttatcgatcttctgcagcatgccttctttgcgcatcttgtcgacaaagtaggtcgacgggacgaccaggtcgtacgcgccgtctttataggttttgagcttggcgtacatggtttcgttcgactcgtaggtcgaatagataaccttgatgccggtctctttggtgaactgctccagcaggcccggcggcacatactcggtccagttatagaaatagagcgttttgctatcgtccgcgtgcgcagcgcccatgccgattgccagagcgctcgccgcgagcaggtggcgtgaccattttttcattttaacgtcccctgagttttatcacgtgcaattaactgactggcgatgaccatcaccagcgacagaaccaacaaaatcgtggccagggcgttcacctctggcgaaacgccaaccttgaccatcgaatagatcttcagtggcaggatttcataccccggaccggtcacgaacgaggagactaccacgtcatccatcgacagggtgaagctcagcaaccacccagcggctaccgccggcagggccagcggcaggataattttgcgcaggatggtcatctcgctggcgcccagatctttcgccgcctccagcatccgcacgtcaaagcctttcaggcgggagtaaacggtgaccaccacaaacggcaggcagaaggtgatatgcgaaaacagcagcgaccagaaaccaagctggacgccgatcagcataaacagcaccagcagagagatggccatcacaatatctggcgacatcatcaccacaaacagcatgccgctgacaaatggtttgccgcgaaagcggtaacggtacagcgccacggcggtcagcgagccgataagggtggcgaaggtcgccgacagcaccgccatggtcagcgagtgctgggcggcctgcagcaggctatcgttgttcatcagcaggctataccagtcggtggtgaacccctgccagttgatgccgaagcgcgaccggttaaacgagttaacgatcagaataataatagggatgtagagatacgcgtagatggcggtcataaagccgccgcgcagcagtcgaccgatcattccagctccacctttttattcagcaggcgcgccgcgcgccagtaaatcaacagcatcaggcccatcaccagggttaaggtaatgctggttgccgcgccgaacggccagtcacggatattgaggaactggcttttgatcacgttgccgatcagcaggttcttggcgccgcccatcaggtcggaaacgtagaacaaccccatcgccggcagcatcaccagcagacagccggcgatgatccccggcatggtcagcgggatgataatgcggataaaggtctgcagcttgctggcgccgagatctttcgccgcttccagcagcgggcgatccagtttctcaatgctggagtagagcggcatcaccataaacggcagcaggatgtacaccaggccgatgatcaccgccgagggggtgaacataatgcgtatcggggtgtcgatcacccccagccacagcagaaactcgttcaggtaacctttagtgctgaggaaaatcttcagcccgtagatgcggatcaacgagttggtccaaaaagggacgatcagcaggaacagcagcaggggccgtaccttctgcggcagccgggcgaggaaccacgcaaacggatagccaagcgccaggcaggcgagggtcgccagcagcgccatgtttagcgaatgcagcagaacgtcataatagagcggatccagtagccgcgaatagttatccagcgtgaagaccagtttgacgaagttggcatcgtcgcgggtcaaaaagctggtggcgatgatcatcaggttgggcaggaagacaaacagcaccagccaaccgacgatagtagcgatcaccacattctggaatttactggtgttcttcatcggccagcaccacctcccagctttccacccaattgatagacattttctggtcaagagagtggtcgaaatccgggtcgtcttcgttaaagaactcgctgaccatcaccattttgccgttctccagttccaccaccgactccagagtcatgcctttatagttgcgctcgcggacatagccgatcaggccgtcggcgtcgctgttatggtggatctcgtcgacgcgcagatcttccgggcgcagcaggacatgcagacgctggccggcctccacggcaaaattgacggtgatgttgcattcccgtccttcaacgctggcgcgcacgcgctgttcgtcgagacgttcaattaccgtggcgtcaaagatattgatctcgccgataaagctggcgacaaacaggttcttcggctcttcgtagatctctcgcggggtgccgtcctgttcgattttgccatcacgcatcaccacgatgcgatcggacatggtcagagcctcttcctgatcgtgggtgacgaagacgaaggtgatcccgagcttacgctgcagcgctttcaattcgttctgcatctgcttgcgcagcttgtaatccagtgccgaaagagactcatcgagcagcagcagacgcggtttgttgaccaccgcgcgggcgatggccacgcgctgctgctggccgccggagagctggtgtggtttgcgctgggcaaacgcctccagctgcaccatctttaaggcatccatcacccgtggggtgatttccgccgccggggttttctgcatccgcaggccaaaggcgacgttctcgaacaccgtcatatgcggaaacagggcgtagctttggaatacggtattgacgtggcggttttccgccggaacatgagtgatatcgtgatcttcgagatggatccgtccgctgtcgacgttttccaggccggcaataaggcgcagaacggtggttttaccgcagccagaggggccaagcagagtgagaaactcaccattgttgatggtcaggttaaggttgtcgatgaccgttttaccatcaaagctcttgcgaattcccgccagatgcaccagcggcgaacgcgaacgcggttgtatattcaatttttgactctgtcccatgtagacgcaacggcaaatttccggccgctgcggggtttgtgattaaccacctttggggttgcacgtttttaataagggccagcattctacggcaaacgagggtaatcgccaatccttgatacgcccgcatagtctacctttacaccataacgtcggttccgttattaaatttcgctttacgggctaaaaatgacctgacgcaatatttgtcttttctggcttatgaataatgttgtcacaaaagaagagggtggctacatggataaattgcttgagcgttttttgcagtacgtttctttggacacgcagtcaaagcctggcgttcgtcaggtccccagcacggaagggcagtggaagctgttacgcctgttgcaggcgcagctggaagaaatgggactggtcaaggtaacgctgagtgaaaaagggacggtaatgggaactttgcccgctaacgttgagggcgatatcccggccatcggttttatctcccacgtcgacacctccccggatttcagtggtaaaaacgttaatccgcagattgttgaaaactatcgcggcggcgatatcgcgctgggtatcggcgatgaggtgctctccccggtgatgttcccggttctgcatcagcttttgggacagacgctgatcaccaccgacgggaaaacgctgctcggggcggacgacaaagccggcattgccgaaattatgaccgcgctggcgaccctgcaggcgaaaaatattcctcatggcgatatccgcgtggccttcacccctgatgaagaggtgggtaaaggggcgaagcatttcgacgtcgaggcctttgacgcccgctgggcctataccgtcgacggcggcggggtcggcgaactggagtttgaaaacttcaacgccgcctcggtgacgataaaaattgtcggtaataacgtgcaccccggcaccgcgaaaggggtgatggtcaacgcgctgtcgctggccgcgcgcattcatgccgaagtaccggccgatgaagcgccggagaccactgaaggctatgaaggtttttatcacctcaccagcatgaaaggcagcgtcgatcgggccgagatgcattacatcatccgcgattttgaccgtaagcacttcgaggcgcgcaagcgcaagatgatggagatcgccaaaaaggtcggcaagggactgcacccggactgttatattgagctggtgatcgaggacagttattacaacatgcatgagcaggtgatcgcccatccgcacgtggtcgatattgcccgccaggcgatggtggactgcgatattgaaccgcagatgaagccgatccgcggcggcaccgacggcgcgcagctctcatttatgggactgccgtgcccaaacctgtttaccggtggctacaactatcacggcaaacatgagtttgtcaccctggaaggaatggagaaagcggtgcaggtgatcgtgcgtatcgccgagctgacggcggcacgcaaagggcattaatcttctcaggcggcccggtaaggccgcgtgtcggacaagatgccggatggcggcttcgccttatctggcctacggtccagccggtgagcgcggaacccgtaggcccggcaagcgcagcgccgccgggcaggatgatggctcagtcgccaaagaaccaatagccgctgttgaccagcgctgccagcatggcgaggaaagaaggatcttccagcgcatcgccaaaatggtcggcgcgcagcgtcagatgggtggctaaggcgtccagcgccggacggtgcggggagttgatcttctcgccgttaacgaatacctcgccgtcaatgcgcagcacccgcaggccgcccaggcgttccagggtatcgccctgctgcagggcatcgtaaatctcatctggctgatacggcggctccggcggcgcgacgtcgagctcatgacgcgactgggtgataaactcgccgaaccactgcttaaagtgctccggttggttaatcagacccagcatcatctcgcgcaggcggtcgagttcggtcggtaaaatatccgccggatggtcgcgggacggcacgtccggatcggcgtagcgctggctgcccagttcgcgctgaaggacatagtcggcaaagccgctaaacagctcgcgggcattcggcgcgcgatagccgaccgaatagttaagcgagttttccagcgaataaccctcatgcgggaatcccggcggaatatagagaatatcgccaggctccatctcttcatcgatgatcgcctcgaaggggtcaacctgcagcaggtccggatgcgggcagtgctgtttcatcggcaccttttccccaacgcgccagcgccgacggccggtgccctgaatgataaacacatcatactgatccagatgcgggccgacgccgcctcccggcaccgagaaggagatcatcaggtcgtcgatacgccagtccggcagggcacggaacggatgcatcagcgctgcggacggttcatgccagtggttaaccgcctgcaccagcagggaccagttgttttcgctcaggtgatcgtagctttcgaaaggaccgtgactgacctgccattttccatcctgatggctgacaaggcggctatcgacctcgctctccatggccagtcctgccagttcgtccgggcttatggggtcgataaaattggcgaagccgcgcttcaataccaccggccgtttttgccagtagcgttcgataaagtcgggccagttaagcgttaattgataatccatattgatattccactgcaggtgtctgacagggattataacggatgcggcgccctggcgatgcaggcgccgtgaaaaatctcaacgattaactctgtttatcttccatctgctggcggccaaacaccacctccatgcaggcgccgccgagcaggctttccccggcgatgatctctccatcatattgttcgacaatttcacgcgcaacggagagccctaccccctggccgggacgcagggtatcagcccgctggccgcggtcgaaaacggcccggcgctggctctgcgggatccccggcccatcgtcttccaccaggatgtgcagatggctgtcggtggtctggcgcacggaaacttccacgaactccagacaatacttacaggcgttatcaagaacgttacccatcacttccataaaatcgttctgctcgccgacaaaagtgatctccggcgagatgtcgagcgagatattgacccctttgcgctgatagaccttgttgagagcggaagtcaggctgtcaagcaggggggcgatcgggtgtaattcccggctcaagagggtgccgccgctgcgcatgctggcgcgatgcaggtaataaccaatctgctgcgagatgcggcttatctgctccagcatcaccggctccgcctcgtcgacgctgatcttctcgccgcgcagcgagcgcagtgtactctgcatcaccgccagcggcgttttcagactgtgagtgagatcggtgagggtagtgcggtatttgtcatagcgttcgcgctcgctgcgaaccaggcggttgaggttgctgaccagccgggtcagctcgcgagtggtgttgggattgagcttttcgcggtgatgttcctccagttcgcgcacctctttggccagcgactcaatgggccgcaggctccaccaggcggcgacccacagcagggggatcaccagcagcaggttggcggccagcacatagacaaaccagctccacaccatatagctgcgcttgagctccaccggaatggtgtcgaccaccacaatgctgagctgaggcattttgctggtggccgggtagaggttgatcgccaccgagtgggtcatctcagagtcgtcgccctgttcgcggatagcgtccagctgttcctgaatctcatggttattgcgcaacagcatactgctgctgtcgacatcggcttcaatctcatggaagccattgcgtttcagccattccggttgaatgcgtttcgccagccagggaacatcacgctgcgcccacagcagtttgccctgctcatcgtagataagggtcaccgtcgggctttccatattcaggttttccgggatgtcgacgtcaatagcgccgttttcccatctcgccagcatataaaagagattgctctcgccgcgcagcaggcgaaaggtggttttatcgaagctaacgctatagcccaccagggccaccatgccgtaggccagggagaggaccagcaccaccccggcggtcgccagcaggaagcgaacccgtaatgacagcgggaagatatgccgcaacagtcccttcatcagcgcaattcgaacagatagccctggccgcgcaccgtggtgatgacgtcctgtgggtattcagcctgaattttcttgcgcagccgacccatcagcacgtcgatggtgtggctttctcgcagttcggcatccgggtaaagctggagcatcagcgaatctttgctgaccactttgccgcggttacggatcagggtttccataatggtatattcaaaggcggtcagcttgatcggctggtcattcaccgacagctcgcgccgggagaggtcgacctggaacggcggcagggagatcacctgcgaggccagaccgctgttacggcgcagcagcgcctgcatgcgggcggcaacctcttcaatatggaaaggcttggtgacgtaatcatccgccccggcgctcagcacttccactttatcctgccatccttcgcgggcggtcagcaccagcaccggcagcgacacgtcatggctgcgccagcggcggatcagtgataaaccgtcttcatccggcaggccgagatcgacgatggcgatatccgggagatgttcgcccagatagtagtccgcttccctggcatcttccgccgcatcgacctgatggcccagctcctgcagctgaactttgaggtggtgacgcagcagggcattatcctcaaccacgagtacgcgcatggctgttctccctagcattttcgatagtagtctgaagctcattatatacgcaaaatataaacggctgttaaataaagctttttataaaaagggcccctggtgcccccgggctggccagcattctgcggcgccctttgcgcatactgcatggaactccttcattctatgcgtaatttcagtaaacgcccagcggcaggatgcgaacggcgagcgggttggtgatgttaattttttgtgtaatagtgctggaatcacccctcaagaacgtcgcaggttatccattatgtctcagcagcagagcgcggactgggtcaggctggcgcaatcgcccagccggacggaacgcatcgaagccttcttcggcggccacggctacgaaccgcaccggcatgatacctacgccatcggccagacgatcgccggcgtgcagagctttcactatcgcggcggactccagcacagcctgcccggcggaacgatggtgcttcatccggacgaaatacacgatggcgaggcgggcaccgaggcggggtttcactaccgtatggtttatatcgaaccggcgctgatccagaagatactcggcggcaggccgctaccgtttatccccgacggcttgtcggcggatccacggctacgtcacgccgcgcagccgctgttgaaagcggtcacggataccttcgagccgctggaggaagaggatgctctgtacgacctggcgcagaccctggccgttgtcggcggccaacgttcccgtcgccaggcgtttgattatcaggcggcggagagggcccgggagtatattcatgcctgttttatgcaggatatgaccctcgacaccctgtcgcaggtcagcggccgggaccgctggagcctgagccgggatttcagaacgctgtacggcaccagcccgtggcgttacgtcatgatgcgtcggctcgatttttgccgccagcggatgcgcgccggggaacgtctggtggatattgccgccgacgcgggctttgccgaccagagccacatgacgcgccagtttatcagccgctttggtctctctccgggccgctggctgcgggcgatccgcggctagcgcggttcaggttgcacaatcgttcaagcgtgaccgcggcgaggcgaactatgctgactgcctttatcacaaggagacagcccatgtatcaactcgttaatcttgctcataaattttccctgttcagcgaacaatggcagcccaaagtggtggctgaaatgaacgactatcagttcaaggtcgtgcgcatcgccggcgactttatctggcacagccacccggaaaccgatgagacattgatggtggtggagggggtattgcgcgtggacttccgcgacgggcatgtgctggtgaaggccggggagatgatcgtcgtgccgcgcggggtggaacataagacctcggcggagacggaagcgaagctgatgctgattgagccgcgcggggtgttgaataccggccacgagggcggcgagcggacggcggtgaacgacgtttggatctgatcgctttccggcgataaaacgcccctctttccggcggaaagaggggcagggcgattacttcagctcgtcaaccatggtggttgcccgaccgatatagttggccggggtcatcgctttgagacgcactttttcctcttccggcagggcgaggctgtcaataaactgcttcatcccttccgcgtccacgcgtttgccgcgggtcagctctttcagcttctcgtacggtttttcgataccgtaacgacgcatcacggtctggatcggctcagccagtacttcccagttgtgatccagttcgtccagcaggcgatcctggttcagctccagcttgctgatcccttttagggtggactgataggcgatcagcgcatagccgatgcccacgccgaggttacgcagaacggtggagtcggtcaggtcgcgctgccagcgggaaaccggcagtttgctggccaggtgctgcatgaccgcattggccaggccgagattgccttcggagttttcgaagtcaattgggttcaccttgtgcggcatggtggaggagccgatttccccggcgatggtcttctgtttgaagtggttgagcgcgatatagccccacacgtcgcgatcgaagtcgatcagaatggtgttgaagcgcgcgatgcagtcaaacagctcagcgatatagtcatgcggctcgatctgcgtggtgtacgggttccactgaatacccagcgaggtaacgaactcttcgctgaactgatgccagtcgacttccgggtaggcggcgatgtgggcgttgtagttacccaccgcgccgttgattttaccgaggatttccacctggttcagctgacgatactgccgctccatacggtaggcgacgttcgccatctctttacccatggtggacggcgttgccggctggccgtgggtacgggagagcagcggcacatcgcggtactgggtcgccagatcttttaccgcgtcaatcagtttgcgccagtaaggcagaaccacttcgtcgcgggcggttttcagcatcagcgcgtgggagaggttattgatgtcttcagacgtacaggcgaagtgaataaactctgataccgcgtgcagctcggcgacgtcagcgactttctctttcaggaaatactctaccgctttcacgtcgtggttagtggtgcgctcgatggttttgatgcgctccgcgtcttcaacgctgaaatcggcgacgattttatcaaggaaaccgtttgcgtcggcagcaaaagcaggaacttccttgatcgctgcgtgggcggccagtttttgcagccaacgtacttccacctgaacgcggaatttcagcaaaccgaattcgctgaagataccgcgcagcgcgctgactttatcgccgtagcggccgtctacaggggaaacggcggtcagtgaggataattccatagatcacaactccggggttaaatgagcaagaatttgctttgcctggttaaccagacgattacgggaaaacataagctgcagacgtccgccgcccacctgatgccagagcaccgcggcgcgaatacccgccagcagcgctgagcgaactttcgcctgcacctgcgggctttgcagcacggcaggggagccggtcacctgaatacgcggccccagcgggcttatcacatcgacatagatgcccgccatggcgctgagcagcgtttcggactgcaggtcaaagtgttccagctgacggtgcaggccggcgatgcggttgccgagcgtgtccatcgcccctttactggcggcgagcttgcgctccagcaccatcaggctcagggtatagcgcgtcagttcagcattgaggccctgacggctgctggtattgagcaccccgagcagcgtttcaagaccgaggcgaagattggcttcactgccaccgaacaccgccagcgtcgactcaggatcgaggtcgatgatgctgttcagcgacacatgcagggcatcgctgtcgcaatgtccctgatgcgccagttgctgaaccagtcgcgccgcctggcaaacgccagccagcgccagggtgatgtcatagtaattcttcgccacacatactccttgtcagccgccagggcggttcgtcccggcggaaataacgcgcgttcaggactgcagaggcagtcgttgttcaataattccgccgccgaggcacacttcccctaaatagaacactgcggactggcccggggtcaccgccgcgaccggctcatcgaagcggacttcgatacggtcttcatccagcgcggtaacggtgcaggggatatcggtctggcgatagcgggttttcaccgtgcagcgcagggtgccctgcagcggttcacggtttacccagtgcagctgttgggcaatcagaccgacggacatcaggcgcgggtggtcatggccctgggcgacgataagaatattattctcaacgtctttatcgaccacgtaccatggatcttcgctaccctctttggtgccgccgatacccagccctttacgctggcccagggtgtggtacatcagcccctgatgggtaccgatctcctcgccgtcgacggtgaggattttgcccggctgcgccggcagatagcggccaaggaaatcgcggaatttacgctcgccgataaagcagatgccggtggaatcttttttcttcgcggtgatcagatccagctcttcggcgatcttacgcacctgcggtttttccagttcacccaccgggaacaggctctgggcaatctgctcgtggctaagggtgtagaggaagtagctctgatctttgttgccgtcgagtccgcgcagcagctggcttttaccgtcgacatcggcgcggcgcacatagtgcccggtggcgatgtagtcggcgccgaggtcttcggcagcaaactcgaggaaggctttaaatttgatctctttattgcacagaatatccgggttcggcgtgcggccggctttgtactcttccaggaagagctcaaagacgttatcccaatattcggcggcaaagttaacggtgtgcagttcaatgcccagcttatcgcagaccgcttgcgcatcggcaaggtcggcggcggcggtgcagtattcctcgccgtcgtcttcctcccagttcttcatgaacagaccttccaccttatacccttgctgcagcagcaggtacgcggagaccgaggagtcgacgccgccggacatgccgacgatcacttttttctggctttctgacatggaaatactcgctacattgaacttcgaggcggcgtattctagcacgcgctcaccgttcattcaccccctgtgaacggccagttaaatgcgccaatcagcgacagcggctgccgcgggtcctgcaggtagcagcgaatgctttcggcaaccagcggcgagcgcaggttcggcgcgttaagaatttcctcagcactgagccacaggcagcgatcgatatcgctgtcgtgcggttcagtggcgcacagatcgctaagttcgatggcgaacaggaagcgcagaaacggggtgttatcgggagccagccactgatgcatgcggatgaaatgctgcggcgtggcgcgaatgccggtctcttcccacagttcacgttcggcggcctgcagcagcgtttcattggcctcgagatggcccgccggctggttccacagcgctttgccgttaatggtttcttcgacgatgagaaatttatcctgggcgtgaaccacgcaggcaacggtgacatgaggtttaaacatcgcttttccttttcagttattcggctttgcgccagtcgccgttggccagtccgtcgagggtatagccgcccatggcgtagcggatcagccgcagggtggggaagccgacgtgggcggtcatccggcgcacctggcggttgcgtccctcgtagagcgtgattttcaaccagcgggtgggaatcgatttgcgctcacgaatcggcgggttgcgcggccacagccagacgggttcctcgacaagttctacgccggcaggcagggtggggccgtcgttaagggtgacgccgtcgcgcaaggcggtcagcgcctcgggcgtgggttcgccttccacctgaacatagtagatcttgccggtgcgcttacccggctgggtcagcttcgcctgcagcgcgccgtcgttggttagcaccagcaggccttcgctgtcgcgatcgagccgacctgcggcgtagacgcccgccaccggaataaaatcttttagcgtgctgcgcccggcttcatcggtaaattgcggcaacacatcatagggtttattgaacaagatcacagtttttggctggcgttctttacgttgtctggtgacttgttgtgtgctgaatcgctcaacgcgatgttttctaaatgaagttttctgcatggtattttcaggctttatcaattgccgcattatagcctaattacgaatgcctttcatggacgcaaacattcaggtagtattgacatgctcattacaaattattaacaaaaaattgctcaaaccgattcgcactacaggcaggaaggcgacacggacgcgatagctccggttatcgggaagacccggtacgccgaagctggccgactcagccaacaccaggctcgcgtgaagagggaagagcagaaccagaagcgctcgaaggagaggttaatggaaagcaaagtagtagttccggcggaaggtcaaaaaatcaccctgcaaaatggcaaactgaacgtccctcacaatccgattatcccgtttattgaaggtgacggtatcggcgttgacgttaccccagcgatgctgaaagtggttgatgccgccgttgagaaagcctataagggcgagcgtaaaatttcctggatggaagtttacaccggtgagaaatcaacccacgtctatggccaggacgtctggctgccagctgaaaccctcgatctgattcgtgactaccgcgttgctatcaaaggtcctctgaccaccccagtcggcggcggcattcgttctctgaacgtggcgctgcgccaggagctggatctttacgtctgcctgcgtccggtacgttactaccagggcaccccgagcccggttaaacacccggaactgaccgacatggttatcttccgtgaaaactcagaagatatctatgcgggtatcgagtggaaagccgactctgcggaagcagacaaagtgatcaaattcctgcgcgatgagatgggtgtgaagaaaattcgcttcccggaacattgcggcatcggcatcaagccgtgctctgaagaaggcaccaaacgcctggtgcgcgccgcgattgaatacgcgatcaccaacgatcgtgattccgtcactctggtgcacaaaggcaacatcatgaagttcaccgaaggcgcgttcaaagactggggctaccagctggctcgcgaagagttcggcggcgagctgatcgacggcggtccgtgggtgaaaatcaagaacccgaacaccggtaaagagatcgtggtgaaagacgtgatcgccgatgcgttcctgcagcagatcctgctgcgtccggcggaatacgacgttatcgcctgtatgaacctgaacggcgactatatctctgacgccctggcggcgcaggttggcggtatcggtatcgccccgggcgccaacatcggtgacgagtgcgcgctgttcgaagcgactcacggtactgcgccgaagtatgccggccaggacaaagtgaacccgggctccatcatcctgtccgcagagatgatgctgcgccacatgcagtggttcgaagccgcagacctgattgtcaaaggcatggaaggcgctatcgccgccaagaccgtgacctatgacttcgaacgtctgatggaaggcgctaagctgctgaaatgttcagaatttggcgacgcgattatcgcgaacatgtaatcccgttggtggattaagtaaaagcgggagccgatgggctcccgttttttttcgccttcagacaattaatctgccggacgcttgaagcattaggcgatggcgaatgtcccgcagcgcaacgttcaacaaagctatatacctcatgacagggagagatccatttgccgtaagatctcgcatgaaaacggattgcacgccaggcgtcatactgatggcccgaccggcttaaaccggggccgttcggcgaatatgtgctgtagcctaaactcaggctatccgcgcactttcagattaaacagccgggacagcgccgctttgccgctatccgacacttgtacttcccgatatcccggcgcgcgcgttatccatcctttttgcaggaacagcgtcattagcgacgaaccggcatcgccgcccagatgaaaacgtctttcgctccagtcgagacaggggcagcagggcttacgccgtgggcgggcgttaaacactgcgccaaggcgttcaagctgggttttaccggctgacgtcagggccaggccatctgccgccagccatttttccctcagcataaattcataaatattgaccgccagctcgcccgccagatgatcgtagcaggtccgggcgtagcgaagattaaccggcgtgctggggagaagcgtcttatgcgcttgcatagagacgcccatcaggttttccagcagcccggcaatatgcgagcccgccaggcggtaatagcggtggcgcccctgcgcgagacacaccaccagcccgttgctgagcagccgggcaagatggccgctggtggtggaggcggacacctcggcgaccgtactgagttcggttgccgtccatgcgcgcccgtccatcagcgcgcagagaatactgacccttgatgagtcagagagggcggaggccaccatcgccatagcggtttccagcacctcctctggctcactgtcttgctgcggtttcaggagattcattcagaaagtatggcccattttttggtcacttccgctgcccgggcgtcatcatcggtaaggagaatgagccggttacggtggtcgctgtactgtaccagaatattaataccattatgggccagggtgtccgcgatgtctcccagttccccaggacgttcctgaggtaactttcgtatcagaggacggcatacattgctgaccgtaaagccggcctcggtcagcaccctgcgggctgtctcaccgtcttccaccagaaaatgcgcatgtccggcatcaggcgtggtgaatacgccaccgccttcgagccccacgccgttgttacccagcgccatacccattgcgccaagcgagcccggcgagttgctgagaatcacgtgaatgtcatacatctgactgtgctccccgatccgatgcgtaatcccggaacacgcgggcgacgcgtattctgtagtatgaaaaaatcgatgctttgccttcgcgctgggcagccagatgctgctcattttgctgccagttggccaccgatgcttcatcttcccaccaggataacgagaggattttgccgggcgtactcaggctctgaaagcgctcgatggcaataaaccccggcgtgtctgatagcaaaggcgtcagcccggccgccagctgaagatatctttcctgtgcttgtggtaaggcgtcggcctcaaaaagtaccgcaatcataagtctgctccatggtgaatttccctgcagtctactgacggccagagcaggaagcttcggtgtgcagcgaaatatgcctggcaggagatcaccgattgcaacggaaatgctcccaggcgttattgcgatggtgaataaaaaagaacgccagccatgcgatacggcagcctgagcgcacagggctggctgagttttagtgaaatcgcgatgtggggggataaaccctgagggctgcggctatcgatgaaagcgatcgccgacgggcagtacgggcgggaaagtcgttttactgacatgcagaatatgaacccggaaacgctcgcccggactagcgaagcgccgccgggcgataatcgaaagagcacgttgtctgccaccggtcacgccttcaggctccgcgctctcctcgggccttagccgggagacctgcgtctcgcctactgtgcatggcggcgcagggtggaggcggggtggcgccgcagcgcctcttcgggacgcacagggcgccgcaccagttcgccgccgcagttcgggcaatgtccgttcagtcgcgtcgtcatgcagtcccggcaaaaggtgcactcgaacgaacagataaacgcctcgggtgagtctggcggcagatctttatcacaacattcgcaattcggacgtaactcgagcatcaacttctcctctggtgaacggctatatcagcgacggcgggccaaagcacgctatgtttatatcatgccgcgatcggtccgccgagaatttccttgcgcggtaatcgccttctcagagggtcgctttcccgggctgcattcccggtacgaggatcactttgcggcacgcctcttcacgtttctcaaagatctgatagccgcgcgcggcctcctccagcggcatatggtgagtgacaatctcctccggggtaagcagcccttgctcaataagcgccagcagatccggcagccaggcgtggacgtgggtttgtcccatcctgaaggtcagtcctttatcaaaggcatcgccaaacataaagccgtggatgaaaccggcgtaaaccccgggtacgctgacgatgccgccgcggcgcacggcggcgatgcactggcgcagggcttttccgctgctcccctcgattttcagggtgctgaggacggtttccgtaaggctacctttcgcctcgaagcccacggcgtcgatcaccgcgtcgacgccgcgatggcccggcgtgttatcgataatccactgcgcaggatcgtcatggtggtcaaagtttatcgggatcgcgccatagcgttgttgcgcgaaatcgagtcggtaatcgttatgatcgatgataaatatctgttctgcgccattgagcctggcgcaggaggcgcagagcaggcctaccgggccggcgccaaaaatagccacgctactgccgggtttgacctcggcgtttttaaccgcctgccaggcggtgggcagaatatctgacagaaacagcaccttttcatcgggtaaggtgtctggcactttaaacggtccggtattggctttggggacccgtacatattccgcctggccgcccgggatcccgccgtacaaatcgctatagccaaacagcgccgccggtggcgaaatgccttttcgattgagcgtcgctccctggccgctattggtgctttcgcaggcggcatactgctgcaagcgacaaaagaagcagtctccgcaggcgatgacaaacgggataaccacccggtcgcctttgcggaccgcggtgacctcggaaccggcttccaccacttcccccataaattcatggccgaaaatatcaccatggtgcgtgccggggatctttccgcggtacagatgcagatcggaaccgcaaatcgctgtcgcggtgacgcgcagaataatatcgtccgctgcctcaagagccgggtcaggcatggtgtcgacgctgacatgatgcgggccgtgataagtgagtgctttcatagaatattctcctcgagagaaaggttgacagcatgcggttcttcggcctggtgaacggctgctatcgtcaccgataaatcatcgtaaaaaataaagcgtagagtactaataatggaactgcgtgatattccaggggctgaatatattccacgcttcgcttatttcccggctggtctgttcgagttatttgcctattgctcttatgtgtgccagtattaatcgggcatgatattcgctccattttgtttgctagccgcttccccagcggctttttttatccgtaaaatcagggaaaattcttaatttccgtctggcaaaggacaatgctgccgcttcgttatataacccaacggtagtaatcctccggtatagataattctttgccgcagaggtgatctgcatacattatttccctgaacacagtgagttagcggcaaggtgccgtctggttatttttcaggtgtcttgtagaattattccgaattactgctaaaaggtgtcgaaaaaacggaataataatttgactaaccagcattacccgctagatttaaatatcgaacgacgagtgatacggaatattttcgtatcgtactgacataaccgatatacatgaggtgaaatatggcagagcatcgtggtggttccggtaattttgctgaagaccgtgaaaaagcttctgaagcaggtcgtaaaggtggtcagcacagcggcgggaactttaaaaatgatccgcagcgtgcgtccgaagcgggtaaaaaaggcggacagaatagccacggcggtggccgcaagtccgataattcctgattatccttttccttgcaccctgaagtgaaagtatctcctgcgagtctgtcacagactcgcagttattttctgactccagaaggtatttctatgaatatgaaaagcattgaagatgtatttattcacctgctctcagatacctacagcgcagagaaacaattaacccgcgggctggctaaactagccagagcggcgtccagtgaaaaactcagcgcggcgttcaatgctcatcttgaagaaacccagggccagatcgaacgtatcgaccagattattgaacaggaatccaacctgaaaatcaaacgcatgaaatgcgtggccatggaaggattaatcgaagaagctaatgaagtcgttgagagcacggaaaaaaatgaggtacgtgatgctgcattaattgccgctgcgcaaaaggtcgagcattacgaaattgccagttacggtactctggtcaccctggcagagcagttgggctataaaaaagcagccaaactgcttgccgaaaccctggaagaagaaaaacaaaccgatgtgaaattaaccgatctggcggtaggtaatattaataagaaagcggaaaaataaactctccctgacacgaggaaatcacgatgaatcacgttgaacattaccatgactggctacgagatgcgcatgccatggaaaaacaggcagagtccatgctggaatcaatggctggccgtatcgataattatccggatctccgtgccagaatcgaacagcatgttaacgagaccaaacggcaaattaccgtgctggaagagatcctcgaccgcaatgagatttcgcgctcggtgattaaagattcgatgagtaaaatggcggctctcggccagtccatcggcgggatgtttccttccgatgaaatcgtcaaaggctcgatcagcgggtacgttttcgagcagtttgaaatcgcctgctatacctctctactggcggccgctgaaaaagcgggcgataccgcctccatcccagccattgaagccatcctggcggaagagcgggaaatggccgactggctgattaaacatattcctcagactacggagcagtttctcctgcgttcagatgctgacggcgtagaagcgaaaaaataacccaggaggcaggcctatgtttcgtcatgtgaaacaactgcagtataccgtacgcgttgctgaaccgaatccggggctcgcgaatttactgctcgaacagtttggcggccctcagggcgagctggccgccgcgtgtcgttatttcacccagggattaagcgatgacgatcccggccgcaaagatatgctgatggatatcgcgacagaggagttgagccatctggagatcattggcactttggtcggcatgctgaataaaggcgccaaaggagccctggcggagggcaccgagagcgaggcggaactctatcgttcgctcaccgccaacggcaatgacagccatattacatccctgctgtacggcggcggtaccccgctgaccaactcggcgggcgtgccgtggacggcggcctacattgatactatcggcgaacccaccgccgacctgcggtcgaatgtcgcggcggaggcgagggcgaagatcgtctatgaacgcctgatcaacgtgaccgacgatcctggcgtgaaagacgcgctggccttcctgatgacccgcgaagcggcgcatcagctctcttttgagaaggccctgcagtcgattcgcaacaactatccaccgggcaaactgccgcccattagcgagtacgctaacacctactacaatatgtctgaaggtggagaagtacgcggcagctggaacagtgacaaacacttcgattatgtcaaggatccacagccgggcgtagacggcggagatggcagtgcttctgtcggcctgacgccagagcaggaagcgctgtgcaaagcgatgctgaagcgaacgcagtctgacccgcagggcgatcctttgaccggcgccgaactcggcgccgggaagcaaaacacttcatcatcggctaagtgatgttcgcatgagccccggctgcggccggggcgattcacaatgatgggtgtggaatatgtttgaattcgacgcgtttcatctggcccgattgcaattcgcctttaccgtatccttccatatcctctttccggccatcaccatcgggcttgccagctaccttgtggtgcttgaggggatgtggctgcgaaccagggataatgtctggcgttcactctacaatttctggctgaaaatttttgccgtcaattttggcatgggcgtagtctccggattagtcatgtcctatcagttcggcaccaactggagcggattttcccagttcgctggcagtattaccggcccgctgctactgtacgaagtgctgaccgccttcttccttgaagcgggattcctcggggtgatgctgtttggctggaataaagtgccgccagcgctgcatttttttaccacctgcatggtggcgcttggcacgttggtttctaccttctggatccttgcctccaatagctggatgcagacgccgcagggttttatcatcgaaaatggccatctcatcccgcaggactggctggcgattatctttaacccctcttttccgtatcgcttgttccatatggcgatagccgcgtttctcagcagcgccatgttcgtcggggcctctgccgcgtggcatcttctgcgcggcaacgactcgccggccatccgcaaaatgctgtcgatggcgatgtggatggcgctactggtggcgccgatccaggcggtggtgggggatatgcatggtcttaacactcttgagcatcagccggcgaagatcgcggccatcgaagggcactgggaaaatcgccccggcgaggccacgccgctgctgctgtttggcctgccggacatggagcaggagcggacccgctatggtcttgagatccccgctctcggtagcctgatccttacccacagcctgcataagcaggtgccggccctgaaagacttcccgaaagaggaccgaccctattcgcccgccgtcttctggtcgtttcgcatcatggtcgggatgggcgtgttgatgatcgccttagggatctgcagcgcctggctgcgctatcggcggcggctgtaccactcgcgtcccttccagtggtttgcgctctgtatggggcccgccggtcttattgccctggtcgccgggtgggtgaccaccgagatgggccgccagccgtgggtgatatacgggttgctgcgcacgcgggatgcggtgtcgttgcacagcaccctgcagatggccatcagcctgctggtatttatcgtggtttactgcgccgtgtttggcgtggggtattactacattttccggcttatcaaaaaagggccgcagccggtgacggagctgacctcgcaaaccgcaggcaccccggcgcgtccgctctcagcggctgagccggtgcgtgatgaggagaacgcatcatgagcatcgatatctcggtgatttggtttgtcatcattgtcttcgcctcgctgatgtatatcgtgatggatggtttcgatttaggtattgggatgctgttcagcgtggtgcatgatggcgaagagcgcgatgtgatggtcaacagcgtcgcccccgtctgggatggtaacgaaacctggctggtgctcggcggggcagggctgttcggcgcctttccgctggcctatgcggtgatcaccgatgcgctggttatcccgctgacggcgatgctcatcggcctgatttttcgcggcgtggcctttgaatttcgttttaaagcggttccctcgcatcgcatcttctgggactatgcctttgccggcggctcgctgttggcgaccttcagccaggggattgtcgtcggcgcgtttatcaacggctttgcggtggctgaccgccgcttcgccggttcgacgctggactggcttacccctttcaatctgttctgcggtctggggctggtggtggcctatctgctgctgggcaccacgtggttgattatgaaaagcgaaggcgcgctgcagcagcggatgcgcgagctgacccgcaaggtactgctggcgctgatggcggtgatcgcggtggtcagcgtctggacgccgttgggctggcgctacgtggcggaacgctggtttacgctgcccaatttcttctggttcgtgccggtgccgattttggtgttggctctgagcctgtggatctggcgcctgagcgcgcgccccgccagccatgcccgtccctttatcctgacgctgggcctgattttcctcggcttcagcgggttggggatcagcgtctggccaaacattattccaccgcatatctccctgtgggatgccgctgcgccgccctccagccaggtatttatgctgccgggggcgctgctcattatcccggtgatcctgatgtataccgcctggagctactacgtctttcgcggcaaagtctccggcagcgagggctatcattgagcctgattcgcgccggcaggtgaggatttgccggcgcgtcgcgccgtccggtcagggatgaccgagagggatgcgcacaaaccggtgatctgctgcaacgactcgggccgggtgtttatgccttcggcggcttgatcttaataataaatcgttcgttaacccgggtgatcctcgcgccaatatcgccaaactcagtggcgattttaaaaaaatcgtccgcggcgacatcaaaatcgagttcaatcttcgggtgttgtcctgtcgccagtaattcatagaaatggtcaaggctgcgggctttttcgctaggcatcttatttctccatggtaaaccaatctgcaggggttttattgcttacggcgcttttacggatgattcagcaggatgacaaacgtgcctgatataaaattatgcaatgacagtaagaatgaggcagggcgaggttattccgtgttgttaaaccgcgtggcgacgcgttgtccgccataccatgacggcagagacgaccctgcggcgccggttgatgatagacattttttgatgacaaattaatgacaataaaatgaatctgtccgggctcgggatggcatcgtgctaaataattttattctgtggctgttaaggtggttgttaactactttatggtgatggagcgtcttttttagggccaacggcgagggaacaacgatgcaattacttgatttattcgcaggcttattatggttaagcagcgttatcttcctgctgtttgttcttgatgtgatcatcacccgttatctttatcgtaaataatcgacaacgacagcggcgttgggcataggggacggcgtcggaggatgataatataacccgcggactgattcagaaaggaatgcgcggtggccgggagaattgattacgatattgaaaaataccagtttaccgaagccggtgagacgccacggctccgggagcagtggcgcgaagtatacctggagtgtcgtcagctgcgggccggggcagaggagcgcctgcgcattgcgttactgaacgtcgactatgtcaccagcttcgagctgccttttcgcctgctgctggtgcgcgcgccgcagctaatcgccgatgttcgcgagacgttgcagcttagccgtaaagccgccgttttcaacggcaaacgttacggctgcgtctatagtttgaaacaggatttacaggctgtaccggaagcctttcattaccgcctggcaaaccgcattcgtcgcgtcgatgcaacggggctgacggcggccccgtaccagcagattgcccgggagataaagccggcccgggagcggctccgccaggcgctgaacgccggcctgccggtcaccgctctcgacgccctgttctggttcggcagtcagcgagtggcggcggacatcgcgcagttgcgccggtccggcatggcgattgtcacgacggaggtggaggtcagcgacaatttgttcaataccacccgacgagtgcccgtttaccgcctggccagcgagtgagtcggcaacctttcgcccagccgttgcctctgcagacagttgaccattgccccgtcgaaccagacgcacagccctctggcgacaggccgcggggccggttccagccatgcgctggcgatgagcattagcgccagtggaaccatgtattttcttttcactgccctttatccgctgcgcctgttctgccagcaaggtagcggtaaagtatgacgtttcgttgaccggggccgcgtttttattatcggcaagcggttgcgttgggtcagagattattcatcttttggcatacgagaggacgaaaactggcggcttgtatttttgatttttattacaccacgcttttttttgccgccggggaaaagcgtaatgtggctacgactggatgcggctcgtcatgtaactggctggtttgaaacaatattttaattgttgtctacacgcatgcgacagcggtggctaatttatattaattcactttaccgatcaataaattatatgttgatagtttttagctatcgaatgtttcttatcgatcattttaaactatttttgttggcgggaaatatatgacatgctttaaccctttcttatttttggtattttttaaatggttgaagaaaacgcgaaaaatacctcctatcgcttcgtactggagcctgctattagcgatgatggcagctgccactcgtgggaattgctcactaaagatattatagcacccgcacgaaataacgcctcagcgcccgcgttttctttctccacgcttaccgaaaacgataagcttgcactatttacccgacaaatcgagttgctttccgtatttgatttttccctggtcgataataagccgatctcgctcaatatcgatgatttattaagccattttattctgacggaccgctatctctgcgattttctgcgctcgtgtaagcatattgctttggagataaatgagaattttcatgagtttatcaccggccgcgagctgacggcgctaagcacgctggcggcgctttgtccggtctggctggatgattttggtcgcgggcgaacctccttcccgctgctggagagattccgcttcgattgcgtcaaagtggataaggattacttctgggataaagaaaacgaccccgctttgcccggtctgttgcagtctattcataccctgaccggccatgtgatcgttgagggtatcgaaaccgaaaagcaaaaacggttaatcacttctgccggggacatcataggtcagggccgctactggaaggaagaatatatttttctttgcggttgagggtcgaccgggggcttgtttcggttacctgctattcttttattatccagttttaaataccccctttgctacagatagtctttattagcgcagtgataagcgcctctcttttttatgaaggatcattccctgtaaatacccccatgcgtaacgccccgatcgccatttcgacgtaagccaggagctgatttctgagctgcgcgagctggtgaaaaaagatctcgccgctgcgatcaattaatcctgcctgcgccatccgctcaggatcgcgctgcatggaaaaatgccgccgtttaccggcggctattgcttattttgcgctaccctggtttttttccagccgggcgaaatactccggtgcaaacgggcgcggatcgacgtcggcaaacggcgcgcgctcaaagtgcgatttcagcgcccaggggaccgtgcagtcaaaaatggtcttgcagctgatgccatttccacggatcgacgggctgtattccggcgtctgggacggatccagctggtgaccgcgaatgccggggattgtcgtaatgctgacgtccccctgcatgcgggtggtcatcgcccacaggatatcgtcgctgtcaaagatgtcgacatcttcatcaaccagaataatattttttagctcggaataggtcgccagcgccagcagcgcggcctgcccctgccggccttcatcggcgggttgacgttttttcacctgcaggatcccgaggaacttaccgccacccgcggtgtgggcgtagacattttgtaaaaagcccggaatggcggcctcgacggcattccagatactggcttccgttggcaggccggcgagggtggtatgctcttcccccggtcccaccagggtctgcagaatcgcattgtttcgcatggtcactgctttgactttgattaccggcagcgacggattagcgccgccgcagtagccaggaaattccggcatcgcgtggccgctattggtgtgctgatcctctctgacgcgcacgccaggcaacagctcaccttcgataacgatctcggcgcgggcgatggctttctccgggacgctgacgccctgaaccagctccaccggacgttgacgcagcgcgccggcgacgcccagctcgttatagccgaacggcgtggtaggggcttcgaagcaggcgccaatatagatggccggatcgagacccatattgatggttatcggcagcggtttgccggcggcctcggccttctggcgaaacacttcgatatggcggccggcggcaagaaacatcgacagctcatcccggccctgaacgcacaagcggtggatggtgacgtcggtcagcgaggcatcgtcgggatcgctggccagcgccaggcccaggcagaagaaggggccggcgtcgataggggtgttggtgggcgccggaagcagggtgcgcaaatcaaaatccggatcgtcggccagaaagatctgttcctggcagggggcgctgctggccgggacgaccaccggcgctaccggttttttcactgccttacccacttcaagggccagctgcgaggcttcgcagcccagcagcagcgcggcccgctggcggctggcgtgcatacccaccagaatgcgcgagtgtggataacccttaatattgttaaacatcatcgccggcccgatgcgggtggggcgcttcacggtgccgcccgcgccgatatggcgataaacaccggccagctcggcgttagggtcaaccggatgatcggtttcgagatactgattgtcatgctgttgcagcagcgcgatggcgtcgcgcagatcctgaatcggtgcggtcatgatgttctccttagcgtatcgatgcgcacagtatgcttcgcaggctaatggttatcaattgcatcatttatgctttattgataagctttttcttatcaatttgtagggaggagtccgaccatgtccttgcgagcgttacgccattttgtggtcgttgccgaagagttgcatatgcaccgggcggcggagcggttacatatcgcccagcccgccctcagtcagcagattaagcagcttgagcagcgcctgggcgtggtgctcttttcccgcgccaaccgccgtctgactctgaccgccgcgggcgaggcctttttacacaagacgcggctggcgctggaaatggccgatcaggcggtgctggacgcccagcgcaccgcgcggggcgagcaggggaggctgcatttggggtatgtctccagcgcgatgtacgacagtaaactgccggggctcctgcgccggctgcgcgccgactggccggggattgagctgtcgctggtgcagggggatgtgcaaatgctctacgaagcgctgttggatctgcgtctggatatcgccatcatccgcgcgccgctggcctcgccgccggacgcgctggtggtcaggccgtttgtacgtgaaaagctctgcctggcgctctatcaacagcatccgctggccggcgtgggcgcgcttaatctggcctcattgcgcactgacaactggatctcgcttgacgatccgcagggcaccggactggagcaggtttttatggatgcctgtcgcgtcgcgggctttacgccgcaggtggcgcagcggattaacgacgttacctcgatgattagcctggtctccgccggggtgggagtggcgttggttccgctctcggcgcgggccttacgccttgataacgtggtgtatatcgatctccaggatcggctggcggagagtgagctgagcatggtttaccaccgccatattcgttcggcggtggtaaggaaagttatctcgctgcttaataccgctgagcgatagtcccggttagctggtcttcaggcggccaaagctgacaatccttgagcggcccagctctttcgcccggtacagcgcggcatccgccgcgcgcagcagactatcgctttgggtgtgctgcgggtagctggcgatgccaatcgacacatccacctggcctatctcggtcagaccatcgcgcagcgtcatattgcgcacctgggtgtagatctcgctggcgcactggtgcgccccggcttcgtcaatcccggggagcagcactaaaaactcctcgcccccgtagcggaaagccatgccgatatcgcgcaccgcgcgctgcacaatggtcgcaacgctcttaatcaccagatccccagcctcatggccatagcgatcattgatggttttaaaatgatcgatgtcgatcatcagacagctcagcggagtatgggtatggaccgccagcgccatctgcgaatgcagcgcttcgtcaagatgatggcggttacgcaggccggtcagggaatcgaacagcgctttttccagcagggcgctgcgcaaacgctgattggccagcgccaggcccaacgcttccgccatcagctcgagataggcccgggaaggagcgtcactggcggtgacgttctggaaagtcagcaggccaatggcttcgccctgggcgatgagcggtacgcagagcgactggccggcgtgcgtctccggcagatgatagcaggtgatatcgggctcgccctgcaccggcggatggctgagtccccgccgtatcgcccagcagtcgtcgggagaaaagggcgtcgtctcaccggcgggcgacagccactgcgctacgcagcgcatctgccaggggtcggtatccagaacatacagtttaccggggatcgtcggggcgatattcggcgcaaaccgctccgccaccttaatcacatcctcaatggtttcacagccctgcagccgctgagtcatacgcgccagcagctcgcggatcgcccagtcggcgtcgcgctgctgctccagccgctgacgggccaggccgttctcgcgaaaaatgcggatcgcctgagccatgtcaccaatctcatccacctgggtaaagtgcggcgtctctaccgcataatcctgggaggcgagacgctggaccacgtcgctcaggcgaaccaccgggtagagcacccggcgtttgagaatgaagccgaggacgaacaaaaacatcagggcggtcaggccgaccatgatttccgacagcgtacgccagatccgcgagcgctcggtggcctggtcgatagcgacggcggcgcgatgctcaagcatctggcggaagcgatcgatctgcgtctgcatgcgctccagttcagtctcgtacgcggtgccgtacagcaccgcgatggccgctggcgcatcgccgcgagcgacatgcgccagggccgcctgctgttcatcctgtagctcatcggcgatccgcaggccatcctggagcagcgccagctcctcgcggctggcgccgttatctttcaggccgcccagccgctgctctatgctcttgtcggtctgctgcagctgctgatattgcgtaagcgtctccggcgaaggctttatcacgtacagccgggcgaggtcagacagcgcccaggcgtcgttttccacctcgtcggagagggtatcaaagacctggcgctgctgtaccgcctggcgttcgacgcggtcggcgctggaggccatgagcatagcgctcccggaagccagcgtcaggccaacggtgatcccgtaagcccagttagtgatggtggcgattctcaccgtgaatttccttgcatgcagatgaagctgttttgattatagaactccgcccccgccacgacggcggcccgcttcagaggcggcgctcgctatgcagaggggcaagggtctgaagaatgatggcgtgtagcgtttccgcatggtggcgcaaaacgaggaagacatcgctatccagagcgccatttataacatccgcttccataatctgtaaggcttcctgccaggccatccctttacgataagggcgatcttcggtcagcgcggtgaaaatatcggcgatggagataatccggtcggcgagggtcaggtgctccttttcgagatgcagagggtagccgctgccgtccattttttcatgatgattcgaggcccagttaatgatgtcgccgagctcgctatagtcgctgagaagttcgccggtcatgtagctgtgctcccgcacctgactcagctcctcatcatccagctcgccctctttttcgagaatggagagtgggatatagaccttgccaatatcgtgtagatagccggctatctgtatttgctgacaggtgggctccggcagctgcatccagcgggcaagctggcgggcgatttcccccaccatgatgctatgggtggcggtaaagctactgtaggtgtcgacgattttggcaatcagcaggcagacatccttcagaccgtgaatatccagatagcgcgtgttgatggggccaataatctccagcagccgctgaatatggccggggtgaaggtgctgccagaagttcgcattttcagcgacctcgcacaggatatcgcagagcggcggatcgatctcccgatgcaaagcgacgaactgttccaccaccgcccgcgtgggccaggcggcaacgtggctatcggccggcagcagccgttcaaaggcatcagcgaaatagacaatgtgctgttcgcgggagccccggtggttcgggctaaaatggtgatcgcgaataaagggaacgatgggctggaaggtcgctaatccctccagcatcgccacaccctggcgctgatgcgggtcgtggatattatcgatagcatccagcgaatgaatggtgcgtttatcccccagcacgccgatatcgtgcagcagcgcggcgcaaaaaatggtctgctgccgttcgtcaggcagttccagcctttgcgccagcgtcagggcgattaaggccgttcgttgcatatgccggtgcagttcagggttaatgatctggatgactctggtggtcagcatcagggccgacttcagggcaatacgcatctctgttctccgttcgcgtgacctggcgggcaaaaatgctctcgccgatgacggaagtgtcgataatctgatcgcaatgcgtgttgtgtgttgctgaacaggtaaatccgcagaatgttttggttcatagctctgcccgtttcagatccagtggtgcaccagagttgggcgatatcgtcctaagaaccttattattgtctgatagttaaccatttcccccccagaaaagaaatgaattctggcaagccctttgcattaagcaagcgtaagtttgattaatgtctatgaagggagtgacctgtatgaattttagagcattacttgccattgcgttattgacgatgagcagcctggcgtttagcgagacgcgtcttccgcatattgttattttagccaccggcggaacgattgctggttcggcggccagcaatacccaaacaaccggctataaagccggggcgcttggggtgcagacgctgattaacgccgtgccggaaatgagtaaaatcgctcacgtcgagggcgagcaggtggccaatattggcagtgagaatatgaccagcgatattattctccagctctcgaagcgggtaaatgcgctattggcccgggacgatgtcgatggcgtggtgatcacccatggcacggacacgctggatgaaaccccgtatttcctcaatctgacggtgaaaagcaacaagccggtggtctttaccgcggcgatgcgcccggcgacggcgatcagcgccgacgggccgatgaacctgctggaagcggtcacggtcgccgccgatcctgatgcccggggacgcggggtaatggtggtgcttaacgaccgcatcggcgcggcgcgctttgtcaccaaaactaatgccacttcgctggataccttccgggcgcccgaggagggctatcttggtgtcgtggtgggcggaaaaccccagttcgagacgcgggtggataaaattcacacgctgcgctcggtgttcgatgtgcgtcagctgaaggttctgccgaaggtggtgattatttatggttaccaggacgatccggagtatatgtacgatgcggcgatcgcccatcatgccgacggtattatctacgccggaaccggggcggggtcggtgtcggtacgtagcgccgccggtatcaaaaaagcgcagcaggcgggcatcgtggtggtgcgagcctcccgtaccggcagcggcgtcgtaccgccggatgacagccagcccgggctggtggccgactccctcaacccggcaaaagcgcgtatactgctgatgaccgcgttgacgcagactaaagatccgcagctgattcagcaatatttccatacctactgatcctctgcggcgagggcgttgttcacaccctcgccgtgctttcttctcaatgacctggcttccatgcaaatcgatggcgaatgattgcccatcattcactccacctgtgtttcccacgaggcgtaaagaaatattttttattgtccggcgggcacagtatttcaatgcaccgcgcttattttaaaagcaggtttaaataagtctattcttaattgttgtcttaaagtcgttttaatctttcttatgctgacggataaaaaaagatgcatttcgcactgggacgcgtttaatactcgctttgacagactacgatgcatcccaacgcggtcaggccgccgatcgcgcggctcagcggacgcctgccaccggcggccagggccgcactgcggcagctttcggttgttttcgttagtaacgctgatgattagcgtgaaaatgatatgcatgatgaatatattaagcgtggctcaagatttaagtttacatttagtaacatatgtgccgcaattatgtttttttgtcagcttgctgttttttacttgccggagggaatttcagcggattagtattgtcgaacttgctgtacgtaccgcctaatgatgataaatggattctgttttccttaagcgttaccacataattaatgtttacaggaaaaatcatggcctgcgtatttaataaacaacttttacacccgcgtaactggctgacctggttcgggctcggcatcctctggttaatcgtgcaactgccttatccgctgctgcattttatcggcaccagcgctggtcgcctttcccgtcgctttcttaaacgccgcgaacatatcgcccggcgtaatatcgaactctgcttcccggacatgtcgccagcggcgcgcgagacgctgatcgatcaaaactttatgtcgctgggaatggggcttatcgaaaccggcatggcctggttctggagcgacgagcgggtcaaaaaatggtttgatgtcgaggggttcgccaaccttaatcacgcgcttagcggtgggaaaggggtaatggtcgtcggcgtgcactttatgtcgctggagctgggcggccgcgcgatggggctgtgtcggccaatgatggccacctaccggccgcacaacagcccgctgatggagtgggtgcaaacccgcggtcgcctgcgttcgaacaaagcgatgatcgatcgcaacaatctgaccggtctggtgcatgccttgaaatccggtgaagcggtgtggttcgcgcccgatcaggattacggtcccaagggcagcgtctttgcaccttttttctccgtcccgcaggcggcgaccaccaacggcacctatgtcctgtcccgcttatcgggcgcgaaaatgttgagcatcagcatggtacgtaagctggatcgccggggctatagcctgcatatcagcgaggtgatgaatgactatccgggtgaggataagcagatcgccgccggctatatcaacaaggttattgagcgcgagatcctgcgcgctcccgagcagtatctgtgggtacaccgtcgttttaaaacccgcccgctgggcgaaccttccgtctattaaccttcccgcacaggctgcgctttcaaaatcccgacagttggggtaacgtgagccggatcatgttttagtcgtgcgcgaaggagtgcagagtgttcgctgagtttggtgttctgaattatttaacctatctggtcggggcggtgtttatcatcctcgttcctggccctaatacgtttttcgtgctgaaaacgggtattgcccacggggtgaagaaaggctatctggcggcggcgggcgtctttattggcgacgcagtgctgatgtttctggccttcgccggggtggcgacgctgattaaaaccacgccggtgttgtttaacgtcgtgcgctacctcggggcaatttacctgctgtggctcgggggcaaaatgctctatgcggtgctgacccagcgcgacggccagtccgacgccagcgcggagccggcgagcgcgatcctcaagcgctccctgaccctgagcctgaccaatccgaaagcgattctgttctatgtgtcgtttttcgtgcagtttatcgatgtcaacgccaaaactcccggcgtggcgttctttatcctggcgctgaccctcgaggtgattagcttctgctatatgagctttttgatcctctccggctcgtttgtcacccgctacgtcaaaacccgcaagaagctggctaaacttggcaacagcctgattggtctggttttcgtcgggttcgccgcgcgcctggctaccctgcagtcctgatccccacgggccggttacccgctgaccggcccgccgtctcttattctgccctgtaacaaaaacccttcattttttattgcattggtgttacatatacagccgtttatcgctcagcaaaaaggaagccccgatgattctgcaaaaactcctcagcaataaaaactgcaaaaaatactgtctgtcgctcgcggtggtgtttgctatcgcgctggcggtagtggggcgggcgaccttcgggggcgtggtgagcgagtacaatatgccgtactcagagtggacgacgtccatgttcttcctgcagggggcgatggtgacggtttacagcattgtctttaccgcgctcttcgctatccccctcggctttattttcctcggcgccgatcgtcaggattaagcgtcaacgggcgaaccgcggttcgccctgtcttatcggcttatcaacagcgtgaagcattagtcgtcgtcatgatagtgatgatggtggtggtggcgatggggatgatatccatcgtcaataatgcatcccgataacagcgtgcacagcgcaataatcaacggtaacacgatcggttttttcatccttacttctcccgctattcttattccccggggccgagaatgccgcggcggataacgtgagtgtaaagggttaacttattgatgggataggataactccgcaatatcgccgcggcgatcaccaccagccgaactgggtgccggccaccgccacgatggcgacgaccagcatgataatggtgctttttttcattatgccccacccggcgccgcatagccgccgacaaaaaaccagccgagaaagacgacggcgatgataaagatcgccaccgggaaaagaatacccaatttcatgattgtgtccctgtacccacgaatgatgccctgcatgatactggatatcgcggtactttagtcaatatgaatgaaattctcctggcggcgggacttcttatcctggtacatcgcctcatcggcagcgcgtaaggccgcttcaacatcgatactctgcggatcgcaggtgaccaccccgaagctggcgccctcatagtcgatacgctgttcgccgaggaagtagacgccgcacagagcctgacgcagggacgtgacatacgcctgctgtgcggcaggctgctgggcgctaccgacgatcaaaaactcatcgccgccaaggcggccaacgatatcttcccggcgcgcgacagcggtgagtcgtttgccgacctgcaccagaaagctgtcgccgcacggatggccgaaccgatcgttaatggctttgaaaccatcgagatcgataaaaataagcgagacctgctgctgctgggcgcgggcggaggcaaagcgtaacgccagctgcttaaacagcgcgcggcgattgggaagctgggtgagctcatcggtagacgagtgcagctccagcgcgacgtttgccgcctgcagctgttgcaccagggtgtctttttccacgtagtgggaaatgagcttcgcaaacaggcccatgacctgttcgccttcgaggttataaggctgttgttgccggctggtggcgcagagggtgccgaacagagagccgtcggccaggcggacgggaatgcttaaaaaagtagcgattcccagctcctgggcggcgatgcaggagtgccagcggttggcaacgtcattgctaaacgtacactgatcctcaagggcgcgtttgcacagggattcatcccaggggacggaaaatccttccgggatctgcatttcgctgctgttgtgggcgaacatgatctgctgccgctgggcgttggtatcaatgcgggtgaggtaggtggactccattcgggtcaccgcctccagcatctccagcagctggcgcaccagggtttccagggactgttccgcagcgagggtttgcgacacccgggcaagaataaaatctgacatgaataatacagctccagcacgccaaacgtcaccccagcatattgggctgcaaacggacatcagcgtcaaataaacagtgatatttttaaatttatcacatctgtctggggaatacttgtccacgcggtgggaaaaaaagccccgtcgggggcgacggggaaaaactcattgattatggaatgatctgttctctggtcagttcgagaacagggctactctacgggggaaaagtgcaggcaagatggagaaaacgtggagattcaggctaaaatccccgggcattcaggaaagggaggaacaatgaaaaagctactggctattctgccactggtattagccggctgtgcccagccgcagcccactgcgccgacgaaaaccatcggcatgcccaaccccgcggcggtatactgtcagcaatccggcggcacccgggtgccggtgcaaacgccgcagggcgtcagcacccagtgcaaactacccagcggcgaaactctcgacgagtgggcgctgtggcgccgggatcatccggctaaatcgtaaccggcagggccgccagccaggcggccagcacccgggcatgattctgctcggtgttcttcgcggcgtacagcagcgtcagcggctggcgttgcgccagcgccgccagccgcaggcccgtttcgcgatgggcgtcgagctcctgacgatagcgctggctgaagtgggcgaaatcgatcgcctcgccgtgaaaggctttgcgcagctcagcggaaggcgttaactccttacaccactcatcacaggccagcgcctcttttttaatcccccgcggccagagacggtcgaccagcacccgatagccgtcgctgctttcctgcgggtcatacacccgtttacactgaatcatcatcctgctccttctgtgccatccaggcgagcaactgcgggatttgcccgtcggaaaataccgtgatgccgtgggcgcggagtaggtcggcggccacgccggcgcccgctttgcgccgtccgcgaaaggaaccgtcatagacaaactggctgccgcaggtagggctgccgtcggtgagtaacgctgcctgacagcccgcttcccgggcggcgctgagcgccagccaggcggccagctgataatgtccggtgacgtcgcggccgtcgctttccacgatccgcgcccgtccggcaagcacatcgccgcccgtgccgccgaggatctccgccggcagtcggggcgtaggcagaccggccgccagctccgggcagtggatcaccagccgccccgcctgctgccagcgggacagcgtcgccgccagctgtgccttctcactaccgttataccgcacctggaatcccatcaggcaggcgctgaccaaaagcttatttttcattctctctcccttacgcgctttttccagtatacctcacccgtcggccacggcggtggggtgaaaataaggattgtgttccacaggcgggatcgctattctgacgtgccttgtgctgtccgtctcgtccagacataaggaacctgctatgaaaactcctttacgcctcgcccttgtcggcgattatcaccccgatattgttgcccatcaggccattcccctggcgatagacgatgccgccgccgtgctggagcagccggtgaaatatgactggctcgccaccccgtcgatcgcctccggcgaggcgctggcggagtacgatgccatctgggtcgttcccggcagcccgtatcgtcacccggaaggcgcgtttaccgcgatccgctatgcccgggaaaacagcattcctttcctcggcacctgcggcggctttcagcacgcggtgattgaatacgcccgcaacgtgctcggctggcaggacgccggacatgcggaaaccgacagcgaagggcggatggtgatcgctcccctcagctgctcgctggtggagacctctgccgtcgtcgagctgcgggcgaatacgctgattgcccgcgcctatggccgggagagcattgaagagggctaccactgccggtacggcgtgagcagcgcgtttgcggcggagctggagcagggcgatctgcgcgtcaccggctgggatgaagagggtgagatccgcgccgtcgagctggtgacgcacccgttttttgtcgccaccttgttccagcatgagcgtcacgcgctggacgggcgtcccgcgccgctggtgcaggcgtttctccgcgccgcggcacaataattccaccggcagcgggcgctgccggtcatcttcaggggtgaatttcccgatcacgtccggcgagcgcgccgcagaccgccatcaccagcgaaatcagcgccaccgccagcagcggaatatgccagtcgccattggcatcatggatcctgcccatcagcggcggcccgcaggcggccagcagatagccgacgctctgcgccatccctgacagcgccgcggcctgatgcgccgagctggcgcgcaggccgataaacgtcaggccgaggatcatggtggctccggagccaaagccgaacagcagcgtccagccgatcgccagctcaggcaacagccacagcccggcggcgctgatggcgcacatcagggcgaccagcaccgcgatcccgcgctggtcgcgcagccgatgcaggatcagcggtatcgccaggccgggcgcggcggtcgccagctgcagcaggccatgcagcgagccggcctgcgcttcgctatagcccatactctgcagaatcgacggcagccagccgataatcacgtaatagaccagcgagttgatgccgaggaacagcgtcacctgccaggccagcgccgaccgccagatcccccggttatgcatagcgcctgagccggtcaatggcgtctccgcccggcaccgggactgcggcagccagctgaggagcgccagtagcgggaagaccatcagcagcagcagcgccccgcgccagccgaatccggccatcgccacggggaccaccagcgccgaaccaagcgccgccgcgccgcccatcgtcagggaataggcgccggtcatccgcgcgacatgctgcgagaaatcccgtttaatcagcccgggcagcagcacgttacccagcgcaatgccgcagccgatcaccgccgtgccgataaacagcagcgcagcggagggcagggagcgcagggcaatgccggcgcagatcagcagcatcgccagcagcaggctgcgttccatgccgaaccggcgggcaacccctgccgccagcggcgagacaaggccaaaggccagcagcggcagggtagtgagcagcccggtctgcgcggtggtcaggccatagtcgctacgaatcgcgtccagcagcggcgccgcgccggtaaagaccacgcgcagggtggtggcgatgagcaggataccggcaatcagcagcgcggggcggcggccggtagaggagatcacagaagacatatcattctcaaggtaactaacgaggggggttacgatagcggctttgtccctcgtttaaatcaagctaaaatgacagattatcgctaatatcggacaatatgatgattggactggggctggatggctatgaaccggacagtggccacgaatcggccattgcctttcgtatccgggtggtggaggcggagcagtatattccggcgcattcccaccgtaaggggcagctgatccttgccctgcacggcgccttgacctgcgaggtggagaacgcaatgtggatggtgccgccgcagtatgcggtgtgggttccggggcagctgtcccacagtaaccgcgctacccccggcgcccaggtatgcttcctgttcatcgagccgggcgccgcgccgatgccggatcgctgctgtacgctaaagatttccccgctggtgcgagagctgatccttactctggcggagcgcggcggagagtccctggccgcccccgccacggcccggctggtgcaggttctgtttgatgagctgccccgccagccgcaggagcacctgcagctgccggtatcaaaccacccgaaaattcgtcaaatggtgacgatgatggccgaggatccggcgcgctggcagaccctgagccagtgggcggcggtgtttgcgatgagcgagcggaatctggcccgcctggtagtgcgcgaaacggggctgagctttcgccgctggcgccatcagctgcagctgatcctcgcgctgcagctgctgatccgcgggcagacggtgcagcagacggctcaggcgctgggctacgattccaccaccgccttcatcaccatgtttaaaaaagggctcgggcagacaccgggccgctatcacggtagcctggctacgacttcccaataaacaatgagatgatcccggcggcaatcagcggcccgaccgggacgccgcgaaacagggcgacgccgagtactgtaccgaccagcagcccggccaccagatgcggctgggagcccatcagggagacgccgcgcccgccgagccacgaaacaaacaccccgaccgcaatcgccagcagcgatttccagttcataaaggagtggatcagcgtcgagggcggcagcgtgccgctggcgataggcgccatcacgccgatggtcagaataatgatcccgacggtcagtccctgtttctcaacccagggaaagaaggcgttcagcggcgtgacgcgcacgataatcagcacgaggatggagatcgccacggtggtgttatgactgataaagccgagcgccgccagacccagcaggatcaacagggtggtatcaaacatgtacagaggtccttgccaaaataagaatgccaaaaaatatcccgcttactctacgcatcgtggcgtgaataaacaggatttttacgccatgcggcggaaatctgggcggatgcccggttagctaagacggcgaaaggtcgcgatctctggtcgggcgatatgtaaatagtcttcggtgtcgagaatgatcgaccggtccaggcgcccggcgttaaaggcgatttgtggaaagcgttcaaacagcagcgggtccgccaccagccgcagcgccggatggaaactgaaggggggaatggcgccgaacacgcaggcggtgagggcatccacctccgccgggctggccagcgaggctttgctgccgccgatatgccgggccaggctggcgagatcggcctgccgatcggcggcgaggatcgccagcacatgctggttgacgccgtttcctttcactttacagactaacgctttcgcgccctggccaagcgcggtgccgcggattgccgagacggcttcgcactgaccgaccgcctcgtgcgccatcacccggtagcgggcccggtgctcgtcgagcagcgcgcacagccgctggtggatattaccttctactgcttcaagcatagcgtcctcctgacatcataaagcagccagcttagcgctgttgcgccggcctgccaacggtgggccgggaaattcaccattcgctcattattacttcacagtgctgtggtgcaatcccgcaggcgcagatgagttttgtaaataaaaaaaagaatgattttcattttcaatcgaactttttttatttcgctcagtctctatcggacgacacagaatattaataattgccgtaatgaggttaggatgatgcacgatgcaaccatgcagggttccccacgcaagaaatttaataaaataagggagctcaacagacggcggaattactttactaagaaagtacgtaatgccctgcgggtgggggtggcgaaagcgctctgggatcgccgacgccgtcagccggtagatttgtcgtctgcgaaaaccgtcctgttgatgcgcaatgagggggcggtcggcgatgtagtggtggattccgcgctggtgaaatgcctgcatcagtcaggctatatcgttgattttttgctgacgacctctaacagccaggtgatgcgttataacccgcggatccgccatatttatgaagctgatccggtcacgtccgccgattttttgcgtaaatttaatcataacgttcctcgcgacgttattaatgaactggctaataataagtacgatattattattgatccttcgctgttcgatattcccgtgcatcgcctgcggcttttccgacaaataaaagccaaatcagtgctcgggtttaataaatggccatcgattaagcactactcccactcttttgattttgactgccagcgctggcacgtgacgaaaacgttcgagctgatcgccgattatctccaactggacacccgcgggctggacgcttacgacctggcggtgcccgggccgattatgcaggaggtggcgcagtatctggcgtcgctaagcggaaaagcggtggtgattaatatttttgccggccatgccgaccgcagtctctcgcagacgcagctggcggaactgctcgacaaactgctggcccgccacccggggagcgcggttattctgctcgatcaccggcgcgagatccgcatcccgctgccgccggaggtggtgattaacccatttaacacgttacaccatgcgatggcgctgatcgcccaggcggagctgattatctccccggacacctcggtggtgcacatggcggcggcgtggaacaaaccgctgatcgcggtctataaggacgttctgcttaataaccggctgtgggccccgggctatgacaacgccaggcagatcattgttaaatgcgggaaggtccatcagcatcgcgggctagtggatagaattatagcggcgctaccggagacgctgtgaggcgatgaggggagacaggtagggctcacctgctggccgtatgcaagagccagcaggtgagcgaaggttgcattgccagtctgcaaccgccgctattgtactgttgcccgcggctctgccacatccgggaaagctcttaaagaggtggtcgccgcgactgacgggcgggatcactcttcagtgagccacatatccgcctcttcaaacatctcctgcaccgtgcggctgatcagctctttttcatgcttgctggcgtcggtgttgatcgccggcagcgtcatcatcggcttcacccgcacttccgcctccgggaaaatgcgctgcatgcgtttggtcagctcgttaagaatggcctctctggcgcccggcagcccggcaaaattgcgcttgtcataaatcagttccacaaacatcttctgtcctctgtatgctgatcgcgggcgatagttttactgtattaatgtacagtgtcaagcgaatgccgcggcgctgcgcatctaccacctcgcgcggcgggcgggctgcgcgcaaaagcagcaaacggttcgctggcgctgaagaagacccctattgacatcaaggagttatttcagtgctggcgattgatagctggagccgatattgaccggtaaaactggcaaaactactgtatatatattcagtgtgcgccgggagaccggttagagatcaaggggtgaaagtccccgaccattgaaggaccagcaatccacaaggtccccgagtcatgcgttgcataccgcgaggtatggggcgaagcgttgacaggggtgttgacaggccagccattgagccacgaaatgtatattaaattaccgggtgccgacgttgtactgttaacggaaggcaacatcatagggtgcgatactgcgagtgccacatggacccggcggggtctgagaccctggcatgtcaatacgatctctacgcgggaaccgggagatctcccctctgaccatctgccagtgtcggagatggcccgcaccgggaagacgaggagtcatagccggtgatgtacggagaggagaagtcggactcgctcatagtagcggcgaagcaggcgaacaacccgaaaggagcggagtcagtggagcgaaggagcggggccaaggggaacgcggaacagccacacatgcgccggacacagagccgggaaagcatgtcacagaggctgtcacgcgtgcgggaagctgcgaagcagcggaagaaagaacggtttacagcattgttccacctgctgacagtcgaagcactggaagccgcattcctctccctgagcaggaaagcggccgccggagtggatggcatcaggtggatggactacgccggaaacatgaagaacaacataacagatctgcaccggaggctacatcagggcagctacagggcgcagcccggcaggcgtcactacatcccaaaagcggatggaaaacaacgcccgctcggcatcgcctcgctggaggacaagatcgtccagtatgcgctggtgaaaatcctgaacgcagtctatgaaaacgactttatggggttctcatacgggttcagacccgggcgaagccagcacgatgcactggacgcactggccacagggctggtacgcactaacgtaaactgggtactggatgccgacatcagtcagttcttcgacagggtgagccacgaatggctgatcaggttcacagagcatcggatcggcgaccggagggtaatcaggctcatacgtaagtggctcacagccgggacgtcggaggagggtcaatggcgagcaacggaggaaggcaccccacagggtgcggtcatctcaccgctgctggcaaacatatacctccactacgtcttcgatctgtgggcgcatcagtggcgacgtcgctatgccacaggcaatgtggtaatggtcagatacgccgatgacatcgtcatcgggttcgacaaacgatacgatgcccggcgcttccgtatagccatgcagcgcagactgagggagttcggactcacggttcacccggagaaaacccgtctgatggagttcggccgcttcgctgccgaaaaccgtgccatcaggggaaaaggcaaaccagaaacgttcaacttcctcgggttcacgcacatcagcgggaaagatcgcaacggcaggttcatgctgatacgaaagacccgccgggatcggatgacggcaactctgaaagccatcaaagacggtctgcgaaggcgctggcattactcaatccccgaacagggaaaatggctcaggagagtggttcagggatacctgaactatcactcggtaccgggcaacttccccaccatgcagaagttcaggacacacgtaacaaacctctggcgccgggcgctcaggcgcaggagccagaaggatgatacgacctggacgaaagcaaacaaactggcagccgcatggctaccaagggttcgggttcttcatccatggcctgtggagcggttcaccgccagacacccgaggcaggagcccggtgcgtaaatcgcgcacgccgggatctgtgcggggggtatccggtaacgggtatccctaccgcgacattgtgtggtgggttgaaaaatgaacgtttacacgccggttgagctacgtcagattgtctcctttcccttttttgccgacctggtgcagtgcggctttcccagcccggctcaggactatgttgagaagcgaatcgacctcaacgagctgctggtgcagcatcccagcgcgacctattttgtcaaagccgctggcgacagcatgatcgatgccggcattgacgaaggcgatttgctggtggtggacagcgcgcgtaaagcggagcatggcgatatcgtgattgccgccgtcggcggcgagtttacggtaaagaagctgcagcttctgccgcgggtgcagcttaacccgatgaacccggcctattcgcccatcgtggtcggccgcgaggagacgctcgatattttcggcgtcgtaacctacatcatcaaggcggcgggctgatcatgttcgcgcattgtgatgtgaacgccttctatgccagctgtcagaccgccttccggccagacctgaaggggcggccggtggtggtgctgtcgaacaacgacggctgcgtgatcgcccgctcggcggaggcgaagccgtttgtgaaaatgggcgaaccctactttaagcagaaggctgcgtttcttcgccacggcgtcgtggcgtttagcagtaattatgagctgtatgccgacatgtccagccgggtgatggccaccctggaagagctcaccccgcgctgcgaaatttacagtatcgatgaggccttttgcgatgtcagcggtgtgcgtcattgcagagatctgaccgattttggccgcgaaatccgcgccacggtgctgcagcgtacccatctgacgctgggcgttggcatcgcccagaccaaaaccctggcgaagctggccaaccacgcggcgaagcagtggccgcggcagacgggcggggtagtggacttgtcctgcccgcagcggcagcgaaagctgatggcgctgctgccggtgagcgaggtctggggcatcgggcggcggatcggcaaaaagcttgaagcgatggggatcggcacggtactccagctggcggagagcgatatccgctttatccgcaagcacttcacggtagtgctcgaacgaacggtacgggagctgcgcggcgagccttgcctggcgctggaggagtttgcccccgctaagcaggaaattatctgcagccgctcgttcggggatcggattacggcctatgaggatatgcgccaggcgatctgcagctatgccgcgcgggcagcagaaaagctgcgcggtgagcatcagtactgccggttcgtctccgcctttgtcaaaaccagccccttcgcgctgaatgaaccctattacggcaacagcgcctcgctaaagctgctgacgccgacccaggactcccgggatattatcgccgcggcgacgagctgtctggatgccatctggaaagcggggcatcgctatcagaaggccggcgtgatgctcggcgatttctacagccagggcgtcgcccagctgaatctgttcgacgagcttgctccgcggcacaacagcgccagactgatgcaggttctcgaccagctgaatgcgaaaaacggcaggggggcgctctattttgccggccaggggatccagcagcagtggcagatgaagcgggagatgctctcgccgcgctacaccacgcgatacggcgacctgctccgcgtcagataacgcgcgctatccctgcaccgcggccggaaaaaccgccaccagccagtcaataaagacgcggagccggggcgggacgtgccggtgccgggcatagacaacgtgaaaaggatagggggccgggcgccaggcgctgaggatctccaccagttcgccgctcgccagcgccggtttcagcgaataggtaaaggtctgcacaatgcctaagccggcctcgccggcggcaatatgcgcgttgctctcattgatgccgagatggggctctgtcttcagctcggtgctgacgccgtgacgcgtaaagcgaaacggaaacgctctgccgctggccggcgacagatagctgatgagccggtggccatgatgtagttcatccggcgaggcgggggtgccgtagcgctgaagatagccaggggtggcgcaggtgaccagcgtcgcctcgccgattttacgggcgatcagcgtcgagtcttccatcggaccgccgcggatggcggagtcaatattgccgctgatgaggtccgcgggcttatcggccacctgcaaattgatacggatatccggccaggaggtcataaagtccgccagcagcgggatcagcacatcgcacgcggtcgacccgccgatggcgatccgtagatggcccttcggcttattgcgggcggtattgaaagacgcgtcgatctcttccaggtcttccagcagacagcgggctttttcatagtactcccgtccttccggcgtcacggtaatacgccgcgtagtgcgctgcaggagggaaaccccaagatgcgcctccagttgctgaatggttttgctgagggtggcgttgggcatattcagcgagtccgcggcgcgggtaaagctgccggcttcgacaacgcgggtgaaggctttgagagctgaaaaccggtccattattcgctttatcctggttactggaggtcattatccaccgaggggaagagtgtttttcagattaggccatttttccgcctcgccgggacgattacagtgctttccatacccggcggggcgcgttcgcgagcctggcctgtttatactctaaccaaggaaatgcaccatgagcaaaaaacttgcggataaagtggcgttagtcaccggcggcagcgccgggattggcctggcgtcggcgaaagcactggcggagcagggcgcgaaggtgtacatcaccggccgccgtcaggaggagctggatgcggcggtaagattcatcggacccgccgcccgcgcgatccgcgccgacgccgccgtgttaagcgaccttgacgcggtatttgcgaccattgccgaagagtccggccggctggatgtgctgttcgccaatgccggcggcggggatatgctgccgctgagcgccatcaccgaagcgcacgtcgaccgaatttttgccaccaacgtgcgcggggtggtgttcaccgtgcaaaaagcgctgccgctgctcaccgatggcgcctcggtgattttgaccggctctacggcggcggtaaaagggacggctaacttcagcatctatagcgccagtaaggccgcggtacgcagcctggcgcgctcctgggcgctggaggttagcgaccgcgggatccgcatcaatgtggtcagcccgggtccggtacgtaccccgggtctgggagggctggtggcggaggcggaccgccagggcttgttcgatgctctggcggccggtgtaccgctcgggcggctgggcgagccggaggagattggccggacggtggtatttttagcgtcggatgagtcgagctttattaacgccgcggagatctatgtcgacggcgggctggcgcaaatctaagcgcctgccgtcgccgcactgacctgaccgggcagaggcgctttcagcagggcgatcagcagcgtactgcccaccatgatccccgccgccagccacaccattcccgacaggccagctgaggcgatcagctggccgccgacaaacgccccggtgccgatggcggcattaaaaatggccacataaatggctgacgccggctgggcgacagcgcccgcgctgcgcagcagccaggtctgtaagcctacgaacacaatcgcgatgccggcgccccacagggctaacagtagcccgctaaaacagaacggcagtggcgcaagacgggcggcgccaaggagcgccagcgcgcccccgctcagcagcagcgcagcgaaaatcagccccttcagatgacgatcgatcagcttacccgcgataacgttacccagcagcccggaaacccctgacagcagtagcaggccggagagagcggtcgccgggactccctgcagatttatcagcagtggttcaatgtaggtgaaggcagcaaagtgagcggtaatgatgcaggccgtggcgccatacaggccaccgagcagcggattgcggaagatatcgcgataaacacgcagcctgacgggggcaggggcggccagcgggggcagcgtcgagcacagcaccgcagcggcggctagtgacagcaaggccatcgacataaacgcgagtcgccagcccgccagggtggcgataaagctcgccagcggcacccccactacgcttgccgctgacacgccgccaaaaatgatcgccgtggccagccccagccggtgcggcggcaccagctgcgcggcgacaatgccaattaaggcccagaaggcgccatgcgccagggcgccaatcatgcgggcgctcatcagggcgaacatcgaataagaccgggttgcggcgaggcaggaaagcgcgaggatcagcatcagcccgaccagcagcgccttgcgggaaatacgcgtcggcattgcgccggaaagcagagccgccagggcgcctacccagccataggcggtgacggcgaggcccacgccggattccgtctggtgaaaatccgccgccagggcgctgagcatgcccaccggcgccagttcgctggtgacgatcgaaaaggcgcagatcccgagcgcaacgacggcaatccagacgcgcgccggcgccgggtggaggggtaaagcaatctctttcatatcaggcgtatccttaggaaaggagcgttccgcgcggtgcacggacgttcaggtgaggagagagcaggcgatcggatggcctggttgtctccgcgaatggcgtgcagtatcatccctgcgaaactgataaaaaagagcggaaaacggagagccgttttccataaatggaaaagagatgaccgcagaattccactgggatgatgctcgcatattcctcgccatcgcccgggcgggaacgctgagcggcgccgccgacaagatgaacatggggattgccacggtctcccgccggctggatcggctggagcaggcgttgaacgttccgctcttcagccgccatcagagcggctaccgcctgaccgacgatggcgaagccctgctcgcgcgggcggaggcgctggaatacgctggcctggcgttcggcgaagcggcgcagctgcaggggcatgtcgccggggttgtccgtctggccacctcggataacctggccacgcattttattctgccctccctgaaagggctcctggaccattatcccgagctgcgggtggaggtgctgagcggcgtgcagccggtgaacctgcaccgtcgggatgccgatctggcgatccgcatggtcaagcctgaggccgggcatctgacgttaaagcggctggggacggtggggtttggcgtctatggcgccgccgactgtctggccggggcggacggcctgtcgctgagcgaggcggactttgtgggttggcggaaactcaccagcacctgccggccgcccaatggatcacgcgcaccctgcgcggccggccgtgtaaagtcgaagccaatacgctcgtggcccaggtttccgcagtatccgcgggcctcggattgggcgtcctgccgcactttatggcgcgggccagcggcctgcagtgcctgcagccggagatcggcgcggatcagaccctctggctggtgatgcattctgacctggccggatccagacgcgtgcgggttctcgccgaccatctcatcgctctctttgcggaccatcaagatcggctggcgatgccctgaaggggcgcggcttgggcgtgtatcgataagactgcccgaggctgacgagccacgattttttccgcgccagctaacagtgatactcgccgcgcaatattcggcccaatgctgccccgcagtcgaaaatactgcagagtgagaggatatccccgtccggcaaaataattttgtgttgtggccagcgcggcattgttgcgctcccccagaaatgcctgtcgatgttagggtgagacgtttatcaccacaggagaacgcaaatgattgtcaggacctggcacggctgtgtgccattgcaacatgctgaggggtttgcccgccacctcgagcggaccggcgtggaacacgctcagagcatcgccggcaaccggggggcgctggtgcgccaggaaaaccagggcgaatgggcgcatttctttcttgccacctactggcaggatctcgcggcggtcaaagccttcgctggcgaagactatcacgtcgcggtcacctatccggacgacgacgcattcgaactcctctccgacccctatgtgtttcagcatgaagtcgaggccgtgtcgccgctgtaggctgatgaccgggcaggtggaagattggccagcagcaggcggttgctggccgcgtgagagcgacgtctaccttgtatgggcagccagccgccgctgggtgaacgtggcatgatgggaacactcagcgcgtgagggccgcgacaatggaggcttccattttctccggcgtcgtgaacggcgcaaaacgcgtgaggggtgtgccgtcgcgaccgatgaggaacttggtgaaattccacttgatccgtccgccgagcacgccgggcaacgcttgtttcagataacgaaacagcgggtgtgcggcggggccgttgacgtccactttctcaaacatcgggaagctcacgccgtagttaacgtgacaagtctgctcgatttcatccgcaccgccgggttcctgcttaccaaactggttgcacgggaaaccaagcactaccagcccttgagccgcgtactttttgtagagcgcttccaggccagcgtattgcggtgtgaagccacaatggctggccgtattcaccaccagaaccaccttgccagcatagtcagccatggagaggggctggccgcgcaggcgggtagccgtcaattgataaaaaggggtcatagcaggctcctgagagtagaaacagttcaacgctgacgatcgcgcgaatgtttgaagcagattaggcagttatgatacacagggttagggatttgtacctggagtgttaaaaaaacgccagatgtcatagagaaaatcgcgaacaggaacggctgaaaatgatgaaatatgtcttatcgctggtggtggtggcgatactcgcaggatgtaccagcacgccaaacttgccgcctcgggataccattgtggcgatgaaacccacagagtccggtattgtcgccagctcagcgaaatacagttaccgctttgtccgtgacggtgtgcctcaggaatatcagcgttataagaccttttatgaacgctttcaccaacaggcttccggcgtgcgggttaactttgtcgtggtacaacatgaggtgacggcggaatatctggtggtgatggatcagcgcaaactggatgccgggcagcatagcgagctggtgaatcagtatcatgcggtgcaaattgataacgatcgcctcggggtgttgtttaaagcgacaggattttggactgcatcggacgcgtcagatctggccgccgcctaccagttagcgcaccccgttgtggtatcaatcaatgataagaccaaaacgattagctcgcttggcgccgttgccctggccccgttgtttccgttttacatgatgtatggatgtgccaccgggccttgtgtctgaggaaaacagccagcaagtcactcgactcactggctgagtatttaattaagcttcacttttagatgactgcttgtgaaacagttcgcggaataccgggtagatatcctcctggtcgcgaatatgctgcatggcgaaattatcaaaggtcgcctgcaggtgttcatactcgcgccacagggtctgatgcgcccggcgggtaatttcgatatagctgtaataacgcaccaccggcagaattttcttcgccagcagttcgtggcacagcggggagtcatcggcccagttgtcgccatccgacgcctgggcggcgtagatgttccactgcgccggatcatagcgggcctgcactacttcatccatcagcttcagggcgctggagacaatggtgccgccggtttcctgagaatagaaaaattcgtgctcatccacctcttttgcctgggtatggtggcggatatagaccacgtcgacgtttttataagtccggctgaggaacagatacagcaggatataaaagcgcttggccatgtctttggtggcctggtccatcgagcctgagacgtccatcagacagaacatcaccgcctggctggaaggctccggccgtttttcgtaatttttgtagcgtaaatcaaaggtgtcgataaacggcacccgctctattttagcccgcagttcggcaatctctttgcgcaggcgctcctcctccagcagctgcaccggttcgctgcggctgatggcttccagatcctcctccagggcgcgcagttcacgacgcttgccggcggtcatcgccgtacggcgggccagcgagttctgcagtgaacgtaccacgctgatgttggctggcaccccattggaggtaaaacccgcgcgatgggttttaaactcgttcagctgccggtgctggtttttcttcaggttcggcagggccagatcttcaaataacagatccaggtattcatctttcgagatctggaagacaaactcatcctttccttcaccatcggcgctggcttgcccctgaccgctaccgccaccgccgccaccgccctgcgggcgctcaatgcggtcgttttgcacaaaatggtcgttgcccgggtggacgcggttgcgcaggccgccgcgaccctgatgaaacatcggctcgttgatatcgtccgtcgggatcgagacggattctccgctctcaatatcggtcaccgagcgcttgttgatggcctcggagatcgactgtttaatctgcgccttataacggcgcaaaaagcgctggcggttgacggcgcttttgtttttcccgttcaggcgtcggtctatgaaccaggtcatatgccctcctgtactgcattagccaactttacttatcatcattcagctgcagttgacccggcggcgtgccgccgggttggacgcatcaggacgatttacgaacccgcaggtaccactcgcacagcaggcgaacctgtttgcgggtgtagcctttctccatcatgcggtcgacaaagtcgtcatgttttttctgctcatcggttgaggttttggcattaaacgaaatgaccggcaacagctcttcggtattggagaacattttcttctcaataaccgtgcgcagtttctcatagctggtccagttcggattacgtccgctgttgttggctctggcgcgcagcacaaagttgacgatttcgttacggaagtctttcgggttgctaatcccggctggcttctcaattttctccagctcggcattcaacgattcacggtcaaacagctgcccggtgtccggatcgcggtattcctgatcctggatccagaagtcagcgtaggtgacatagcgatcgaaaatgttctgcccatactcggagtaggattccagataagcggtctggatctctttgccgataaactcggcgtatttcgggatcagatagcctttgaggaattccagatagcgctcggcctgctcctgtgggaactgttcgcgctcaatctgctgctccagcacatagaacagatgcaccgggttggcggccacctcgacgtggtcgaagttaaacacccgagacaggatcttaaaggcaaagcgggtggagagcccgttcatcccttcatcaaccccggcgtaatcgcgatactcctgataggacttcgctttcgggtcggtatctttcagactttcgccgtcatagacccgcatcttcgagtagatgctcgagttttccggctctttcaggcgcgacagaatcgaaaagcgcgccagcgtttccagggtgcccggggcgcagggcgcatgggtcagctcactgttgttgagcagtttttcatagatgcggatctcttcggagatacgcaggcaataaggcaccttgacgatatagacgcggtcgaggaaggcctcattgttcttgttattacggaaggtcacccattccgattcgttggagtgagcaaggatgatcccgttaaacggcagggcggagatcccttcggtgccgttatagttaccttcctgggtggcggtcagcagcggatgcagcaccttaatcggcgctttaaacatctcgacgaactccataatcccctggttggcgcggcacagcgcaccggagtagccgtaggcgtccgggtcgttctgcgcatagtgttccagcttacggatatccaccttaccgaccagcgctgaaatatcctggttgttttcatcacccggttcggttttggcgatggcaacctgctcgagaatcgatggccagactttaaccacgcggaatttcgtgatatcgccgccaaactcgtgcaggcgcttggccgcccacggcgacataatggtgccgagatagcgggtcgggatgccgtactctttctggaggatctgcgcatcttcctgtggattgaacaggcacagcgggtgatcgttgaccggactgcgttcgccgttggcgctcagcacatagatgggcacgcgctgcatcagcgctttcagccgttcagccagcgacgatttaccaccgcccaccggccccagcagatagaggatctgtttcttctcttccagcccctgggcggcatgcttgaggtaggaaacgatctgctcaatggcgtcttccataccgtaaaactcttcaaatgccggatagcgtgcgataacccggtttgaaaagagacgggatagccgcggctcgagagccgtatcaaccatgacgggttcaccaatggccatcaacagacgttctgccgcattggcataggcactgcgatcttgccggcagatggtaagaaactcctgcagtgtgaactcttcgtccttggcagcttcgtagcgctggcgatagtgatcgaatatattcatggcatgccgtcctttcgttttttagcacaggttgagagccgttcatatgaatagtgggggcccccggaagacataagctgaacatcgctctcctggtatccagcaacccttatgccaggttgcgggtggggtagcgtgaatgtgcccggcaattacaccttctaaatttaagcgtagatgcatttagaaatcttgcatggcgcagaaaatcaatttcaatgacatatcaataactcatcctgaacatgacgctttttgattcgttgggacgcaaagttgtcatcgggctgtcaccggatggtaagagaagggtggcaaagtgaacgatttgtgtcatatcgggtaaagaatttgaggcatgagacctacgacggtacactgcacgggctgattatttgacaacgggaatatggattgtgactaaaatcaaacttctggcactcggcgtgctgatagcgatgtccgccagcgcggcgcatgccgacgggaagttcactcttggggctggcgtaggggtcgttgagcatccgtataagcaatatgatgcggatgtctatccggtgccggtcattagttatgagagcgaaaacttctggttccacggtctgggcgggggttactacctgtggaatgacaccaacgataaactgtcgattacggcctactggtcgccaatgtacttcaagccgggcgacagcgacagcgagcagatgcgtcgactggataaacgtaaatcgaccgtgatggccggtctttcttatgtccacaacacgccctatggcttcctgcgcacgacgattgccggcgatacgctggataacagcaacggtattaactgggatctcgcctggctgtaccgttacaccaacggtaacctgacgctgacgccgggtattggcgtggagtggaacagcgacaatcagaacgaatactactatggtgtctcccggcacgagtcgcgccgcagcggcatgcgcagctatgacccggacagtagctggaacccgtatctggaactgtcggctaactatcgcttccttggtgactggagcgtttacggcgtggcgcgctacacgcgtctgtcggatgaaattaccgacagtccgatggtggataaatcctggagcggtctgatctccaccgggatcacctacaccttctgattgtgcattcttacagtgcgcttcatgcagcaaaacagggccttgcgccctgttttgctttatggtggtgcatacggttaaggaggagaagatggtgaaaaaaacagtacgcttcggcgagcaggcggcagtgccggccatcgggctgggcacctggtatatgggcgaacatgcggcgcagcgtcagcaggaagtggctgcactgcgggcgggcatcgaccatggactgacggtgatcgatacggcggaaatgtacgccgacggcggggcggaggaagtggtgggccaggcgatccgcggtctgcgcgaccgggtagtgctggtctccaaagtctatccctggcatgccggcaaagcggcgatgcaccgcgcctgtgaaaacagcctgcgccggctgcagaccgactatctggacatgtatctcctgcactggcgcggggatatcccgctgcaggagacggttgaggcgatggagaagctggtggccgagggcaagatccgccgctggggcgtctctaatctggacaccgaggatatgcaggcgctgtggcggacggcggatggcgagcactgtgcaaccaaccaggtgctctaccatctcgcatcgcggggcattgaatacgatctcctgccctggtgccagcagcacagtctgccggtgatggcctactgcccgctggcgcaggctgggcgcttacgcgatggactttttcagcatagcgatatcattaatatggctaacgcgcgggggattacggtagcgcaactgctgctcgcttgggtgattcgtcatccgggagtgctggcgatcccgaaagcggccagtattgagcatgtggtgcagaatgccgcagcgctcgacatcgtccttagtggggaagagctcgcgcagctggaccgcctctatccgccgccgcagcgaaaaacccggctggatatggtttaacccatcgttcacggcaaagaaaaacaaaagccccgttaccaacggggcttttgctattagcgttttttcacgctgatggtttgcgccaggcgagagggcgtctcttcgctggctttctgcggctgggttacgcagcaggtttcgacgcaaacgaaggttttgtagccatcgtccggcatatcgcccatgctgacggacagcgccgggcccgggttccaggccaccacattgtgctgatgatgatgcaccacgtcgatagtgcggtttagcgcgtcgtcatggatcacgctgcagctgtcggcgttgagatagacgcgatcggtgcggtccgggaaggtctgcacgccgttgctcagaacgccttcttcggcattgttcactttatcgatatagcgctcgccaagaccgctcaccttcaccgccgcgatatcgccgacgttgaaatagctgtgcagggcagaggtggtctcgaattcaccgtgggcttccagctcgatttcacaggtcttgcccagcttaaagcgggcatagagggtgaactcgtgcggccagagcttcatggtttcagcgctgtgctggagcgcaaaggtcaacattacgccgctgtcgtcttcgtcatgaccttccagggtccatggcagattgcgggcaaagccgtgcgacggcagaccttgctgcgcagaaggaccaaaccagggccagcaaatcggcacgccgccgcgcagggcgacgccctgtttaaacggggtgttgttgctcagccacagaacttcttcttcaccggcgggtttccaggagagcaggtgcgccccctgcagcgccacagaggctttcacctgcggatggtcgatgacaatcagctccaggtcgtccagctggcgacgggagatcacgggagaaatggtttcattcaccgggagagcaaaaattttatttatcattgtgcaatcctatctctgcagacaaaaaaaagagcgaccgaagtcgctcttacagattactttttcatctcaacttatttggagatgtgggcaatcagatccagaactttgttggagtagccggtttcgttgtcgtaccaggaaaccagtttcacgaagttgtcgttcagtgcgatacccgctttagcatcgaacacggaagtgcaaacttcgccgttgaagtcggtagaaacaacgtcgtcttcggtgtaacccagaacgcctttcatagcgccttcagaagcggctttgatggctttcttgatttcttcgtaggacgctgctttttccagacgaacggtcaggtcaacaacagatacgttcggagtcggaacgcggaacgccataccggtcagtttgccgttcagttctggcagtactttacctactgctttagcagcgccggtagaggacgggatgatgttctgagctgcgccgcggccgccgcgccagtctttgtgagacgggccatcaacggttttctgagtagcggtggtagcgtggacggtggtcatcaggccttcaacgataccgaagttgtcgttgataactttagccagcggcgccaggcagttggtggtgcaggaagcgttggaaacgatgtcctggccagcgtaagcgtcgaagttagcgccgcgaacgaacatcggagtgttgtctttggacgggccagtcagaacgacttttttcgcgccagcggtgatgtgtttacgagcggtttcgtcggtcaggaagataccggttgcttcagcaacaacgtcaacaccaacttcgtcccacttcaggttagccgggtcacgttcagcggtaacacggatttttttaccgttaacgaccagatgaccgtctttcacttcaacggtaccgtcgaaacgaccgtgagtggagtcatacttcagcatgtaagccatgtactctgcgtctaacaggtcgttgattgcaacgatctcgatgtcagaacgtttctgagcagcacggaaaacaatgcgaccgatacggccaaaaccgttgatacctactttgatagtcatatattccaccagctatttgttagtgaataaaaggttgcctgtaaaattacaaaaaccttacgcagcgtcaagcggaatcgtgtcaatcattgcgacaaatcaatcctgagcagacctttgcgcgattgatttgcctcactttccctttgagcccaattccatatgggggctgcgcgcggaattttaaagggcatttaagataaaaacgtgatttaagtcacaattatctggctgcctgtgggcaccggataagtttagaacaaaagtgtacgcttcattgttaatgttttgttagaattggagcgaaagtagtccattgcaaagcgagatgtaagcccatggcgaataaacccaccccggaagagctgaaaaatggcttgagcgaaatgcagttttacgtgacgcagcatcatggcaccgaaccgcctttcaccggacggctgttgcacaacaagaaaaatggcgtgtaccactgcctggtgtgcgatgcgccgctgtttaactcccagactaaatacgactccggctgcggctggccgagcttctacgagccggtaagcgcggaggccattcgctatctgaccgacaattcgcacggcatgcagcgcattgagatccgttgcggaaactgtgatgcccatctcggccacgtgtttccggatggtccgcagccgaccggcgagcgctattgtgtcaactcggcatcgctgagcttcaccgatgagcaaaatggcgagcaaatcaagggttgaagaaacgattcagcaaattattccaggcggaggtgagcggaagatggatattgagcaaattatcgacagtatgacgccggaagtgtatcagcgtctggcgacggcggtagagctgggaaaatggccggatggcgtcgcgctgacgccggagcagaaggaaaatagcctgcagctggtgatgctctggcaggcccggtataacaccgacgcccagcacatgaccatcgacaccagcgggcagatggtaatgaagagcaaacagcagctgaaagaggattttggcatcgtgccgaagccgatcgccaccgttaaactgcaataaaccgccggccggcggtgagacgttccggcgtcgggtaaccgcgcgccggatggcgtcatgtcgaatgaccgcgtccggcggtcagccgcttcgcttactttttgttcatcatcgctttcagatcggcaaacgggttgtaggtggcctcgccgacgctcttttgcgcatcttcccctgccaccaccgtggagccatactgatcggcttcggtgtacttggaatgttcgtgatcgtgacagtacaggcacaacatctcccagttgctgccatcttccgggttattggagtggtcgtgatcgatgtggtgcaccgtcagctcgcgcagattggagtagacaaactcccgtgagcagcgtccgcacacccagggaaaaagcttgagcgccttttcgcggtaacccacttccagacgtgcgtaatttttggggatataggccatggccccctgcctcctgtcaaacggttaagctgcgccaacccctggcgcagcggataacaggcatcataacctatcccgggcggcgcgatatacctgcattgcaggcgatgctgcctgcgtcacgcctcccggtgccgacgatgcggcggaacagccatgattagtgtttgatccccagcgattccgccagctgacgggccagctgattctggtcatcggcgccatattcccagaacatggccccggcgaggcccttcgccttgatatagtccgccttaatggctaccgagcgcgggttctcataggagagggcgaacagcggcttgccctctgcggactgcaccgacagccacggaaccttcgcctcatcgtcccagtgctcggtaaaacgcttttgcggatcgttgagcagtttgcccacgatatcattgtatttcacataggtgtctttgctcaggtcatagcccagcgaggcaaacagcgcgatctgttgtggcccaaaatagggctgggtgaccggattgttttgcgcatccgctttcgtccagtcaatccccggctcgaccgcccgtttcggtacccggccataaaaaccaatcccgaggttcatctggctgggtttaagcccggcggccaggtaattgttgaccacaaaatcggcgctgtatttatccgctgcggcgaccgtcggccagtggctggagtcatacagattcgagttgaagtactgcgtgccgtaggccatgtcgtaggtcatcaggttgatgtagttcagcaccggggccaccgctttgacgtccacccagcttttcgggctctcggcattggcgcccacggcgatagtcaccagcttttgctcaccgactgcctcacgcagcgatttcagcagggcagtgaagttgtcgcggtcagccggctggctggccaccagtccccaggcgccgttgaccggaaactcccagtcgaggtcaatgccgtccagaccatattgctggatgattttctgcgcggaacgaataaagacggcgcgactttctgcggtcgccgccgcgccggagaaaccacgcgcgccccagccgccgaccgacagcaggactttgaggtccggattctgtttacgcagggcggggagcttttgcagatccgcctgcaccttcggcgacagccagatctcgtgcagatgagcaggatccttcagggccgcattggtctcgtctttttcatcgttatagataaggccaaacgagtagttgagatgggtgatctgccggacgtccagcttatcgatatcaccgcccggcccggcggtgacgtcgccgccgccgttaaaatagccgacggacatcagcggttgggcagagagcgcggaagcgcaaagcaagggcaaggctgccagcaagggcaaacgtttcatagtggttcctctttgacataaaaataaccacgccacggaaatggcgtggcgaaaaaacagccttgccagactagcagcaataacctgttgaaactgcgagagagttcaatttatggacaatagcgaggcggcagaagaagacccggcgcgagggcgccgggggggagggatcaggcctgagtttcccgccagtcgtcgagggtatagagcgtggcgcccgcggcggccatctccataaacgcctggctgctgtcctgtggctgcagatttacgccgcgacagccgtcggtgatgacgttgaccgcgtagcccagcgccagggcatccagcacggtgaacttaacgcagtaatcggtggcgaggccgagaacggtcagctccacgatcccctgaccacgcagccagccgtccagttcggttttctgccggtgaccgttgtcaaagaaagcgctatagctgtcgatgatccggttttgccctttgtggaacacagcggcgatcgcctgctgcttgagcagcggatgcagcgccgcgccttcgctgtgctgcacgcagtgatccggccagaaagtttgcgccaggccgtccagctcgccctcggtgtagggttccacctggtgctggctggcgaaactgccgtgatccgccggatgccagtcctggctggcgacgatgggctcgccgcgcgccaggctccagtcgataagcgcattggctacgtcgacggtactgtcgccttcaggaacggccagcgcgccgccggcgcaaaagtcgttctgcaaatcaaccagtaacagcgctcgatgtgccatacgtcctccttaagcctcgtcgggggtgagttcgccacgcagattttgctgcatcgccgcgcgaatggcgtcaacgtccagctgctggctaagcagatagtgtagcttggtcagcgtcgcttccaccgtcatatcgaaaccactgatgacccccgcctgggcgagggcgttgccggtggcatagccgcccatgttcacctttccggacatgcactgcgtcagattgaccactacaataccgcgctggctggcttccgccagcacctgaataaactcgccattctgtggggcattgccgacgccataggagcggaggatcagcgctttcaccggttggcgcaaaaaattacgcaccacgtcggcggagatgccgggataaatcgtcaccacgccaatcggctgcggagtgatggggtgcacgataagctctccgctaccctgcggcgccggcggagtaccgagacggcgaatatggatcccggcctccagcagcggggcaaggtttggcgaggcgaaagcgtcgaagccgtcggcatgggctttggtggtgcggttgccgcggaacagtcgattgttgaagaacagcgccacttcgttaatcggatagttggcggcgacgtacagggcgttgagcaggttaatctgaccatcggaacgcagctcggccagcggaatttgagaccccgtcacaatgaccggcttgccaaggttttccagcatgaacgacagcgccgaggcggtaaacgccatggtgtcggttccgtggaggatcacaaagccatcatactcctcataattgctgcggatatcgtcggcgatgtgctgccagtcctcgggggtcatatcggatgaatccatcagcggatggtattcatggatcgtgaagtccggcatctccggacgatggaactccggcatcagcgccagctgacgctgcagatggccggaaacgggtacatagccgtgttcagagcgctgcataccgatggtcccaccggtgtaggcaacgtaaatcgattttttttgcatagcatcgcttaggttggtcgtagacaggcgcagtataaagagacgcaggaaaaaatacagcgtcggtcgcgggctttgtggcagtgttggcaggagagggaaaaaggctgccccgggagacggggcagccgctgcgtattaacggatgttagcgcaggtcaggcagaaggcatagcgattctgcgggtcgttaaacgccgccagcttgtcgctctccgctttcaccgtctcggccgccgcggcgaccggcgcaggcagccaggcctgaatggccgccggcagcgaggcgcgtaccgagccggtcaggctatccagcaccatcgagaagaaggtcggctcttcctgatagtaattgaggtgccaggttttcagcttcgccagctcggcggctttggccaccgcgtcgtcgaagtcgccgaggctgtcgaccaggccgttggctttagcatcttccccggtccagacgtggccctgggcgatctggtcgattttctccggcgtgctcttacgggcgttagccaccagggtgataaagcgctgatagccattctcaatgctcaactgcatcagctgctgcacttccggcggcagcgctttggtgctggagacatccgccagcggcgacgtggcgacgccgtcggtgtggacgccaatcgacccgagggtattttccacggtgttgatcaccccaaagatgccaatggagccggtgagggtgcttgggttcgccacgatgtaatccgctggggtggagatccagtagccgccggacgccgccatgccgcccatcgagaccactaccggtttaccggcggctttggctgccgccagctcttcacgaatgatttccgaagcggttacgctgccgcccgggctgtttacgcgcagaacgatggccttaattttcggatcgaggcgcgcatcgcgaatttgcgctgcggtggtatcgccgccgacgttgcccggggtctcttcaccgtccatgatggcgccgttggcgaagattaccgcgatggcggaaccctggtcagacggcgtcttcacgttgtagtcgtaatagctgatcgcccggtaattgttatccgctttgctccagccaaactgtttggtcagcgccttttccacttccgtggaggtcgccagctcatccaccagcttattgtccagcgcatatttcgccgtatcgccgcccaccttacgcaggccatcgataatgcccagggcgcccgggaagagctgctgggcggtgatctggcggttggcggcaatggtgttgaggtagttctgccacagttcgccaatccagcggctatccgcttcgcgggcggcaggggacatatcatcgcggatgaatggctcgacggcggatttataggtgccgacgcggaagacatgggtggagaccttcagcttatccagcagcgatttgtaatatagcccgttggtagcgaagccgtgcaggtctacctcgccctgcggcgagagccagattttgttggcgaagctcgccaggtagtactggccctggctgtagctgctgccgacggcatacaccggtttgccgctatcgcggaattcgcgcagcgctttgccgatgtactgcatggatggctggtcgccgccgacgaagtttttcaaatccagcacaataccggtgatattgcggtcatccttcgcctggcgaatggtctgcacgatatcgaacagggaattctcctgcagacggtccgagctggcgccaaacagctggcggccaatcacgccgagcttgctgctggcggatggtttatccaccaccacgccggtaatatccagcaacagcgcgccgcgcgcggcatgttcgctggtggtgctgctgaactggctccagatgccgatacacaccagcaccagcaccaggaagatcgcattgagggccagtttgcgaataaagttgagtatccgccacgtccatttaaaaaagctggcaatcagtcgccaaagggttcgcatgtcttctccctaacgttatctaaaaagggcaggccgcaggggccgccgcgtctggctatcctaaagagtgagccgtcggttgtcagcaggaatcaccgaccgcgctgtaacaaaatccttgtgcatgttaattttatgaaaaatgacatcacaggagttatacagatggatgctctcgatctactgcttaatcgccgcagcgcttcccgcctggcggaacctgccccggcgggcgaacagctggaaaacattctgcgcgccgggctgcgcgccccggatcatggcaccctgcagccgtggcgcttctttattatcgccgatgacggccgcgagcgcttcagccagttgctggaaaaaggggccagagaggccggccaggatgagaagggaatagagaaagcccgcaatgcgccgttccgcgcgccgctgattattaccgtggtcgcgcgctgtgaagaccaccctaaggtgccgcgctgggagcaggagatgtccgctggctgcgcggtgatggcgatgcagatggcggccctggctcagggattcaacggtatctggcgcagcggagcattgaccgagagtccggtggtgcgggccggcttcgagtgccgcgaacaggataaaatcgtcggcttcctctatctggggacgccgcagctaaaagcctcaaccaccattgccctgccggataccgcgccgtttgtgacgcgattctgagtcggtgcttattatgccgggtggcggctggcgccttacccggccaacgcatccggctctgactgtctgtaggcccgcgcaagcgcagcgccgccgggcaaggacagcgggcacggagccgattttgtgccgggtggcggctgcgccttacccggcctacgttcgtacgacctgtcgttaatttattcacttttcttgctgaaactgccggtgctgacggcctcaaaatcgctgagacgttcccggcaggccggggcagcccgcatggatgcgggctgagggccgtgttttgcagggacgctgcctcggcccgacccgaagcctgcagggataagtcgaagggaccgcgcagcggcgattttgctggccagagcccgggggtacagggggcggcggtgactggccgccccctgtgcgctcccggcgccatgagtgacataacgcagacgattaaccgggagcgcaaactacgctgaagccacagataacataaacaaccacactgcagtgcttcccctcaccctggccctctcccggagggagagggaaccgtccggctggccgcgcaagcgcagcgccgccgggcgatggcagcaggctcggagccgcatctatgccgggtggcggctcgcgcctgacccggcctacaacccctaccattcgaatcaatcgcggtttttgtagcccggacaaggcgcgccaggcgccgcatccgggaatgcaacggcgatgacgttacttctgccttttcgcgaattcatctttggctttctgcaactgctgctggaaggccgggttggtgtgcagcgtagcgaccaccgcggagccgacgatgcgcgccgcatcgacatcgctctgccagtgatagccgcagatcacccggctctcgccgagctcatagccgcgcttcaaaatttcgttttgccgctgcgggttgatctccgccagcaccagggcggtggcccagccgatagaggtatgcccggacgggtaagagccgtttttcgccagcttgtcctgttcggtggtattgcaggtggagacgccatagaacgcaaacgggcgaatgcgcatgtatttctctttcgcgctgcgggtcgccaggtcgccggcgtcttcaatcatattggtcagcagtttgtgaagctgcggcgcgtctttctcggtgatcggcgaaccaaaggcgctggagaaggcgttggccacgccgcccgcgctgaggttggcatcctctgccgccagcttcccgcgctcggtattgcgcagcagacgtccttgctcatacatcgcctgatcgtttaaaaatgcgatactgcccaccgccggcggtggtggcaacagcgccaggctgtcgatggcctgggcattggtcagatagtagagatcgggcttggtggtgacatcgttcccggggggaaccagagcaaaggcgttaacggagaagaaactggccaggcaaagggcaagaacacgctttttcattagaatttccttacgtcataatcattccagagaagacagtcctgtgctgtcacatttctgtcatctttaagtaaaagtgaaaatggtcgggaaaaaattgccgtgtctcgcaaaaacggctttttgtctgcttaatgagcaaccatacgcgatttcagactgtcgtacttaccaccctggcgtttgggcgctaacatagcgggattgcaatgacaggagatgtccatgagcgagcaagccattcgtttaacgcaatacagccacggagccggttgtggttgtaaaatttccccgaaagtgctggaaactatcctgcatagcgagcaggcgaagtttgtcgacccaaacctgcttgtcggcaacgaaaccagcgatgatgccgccgtttacgatctcggtaatggcacctcgatcgtcagcaccaccgatttctttatgccgattgtcgataacccgttcgactttggccgcatcgccgctaccaacgccatcagcgatattttcgctatgggcgggaaaccgattatggcgattgccatcctcggctggccgatcaacaccctggcgccggaaatcgctcgcgaagtggtggagggcgggcgctttgcctgccagcaggcggggatcgcgctggcgggcggccactccattgacgccccggagccgatcttcggtctggcggtcaccggcgtggtgcccaccgagcgcatcaagaaaaacagcaccgcccaggcgggttgcaaactgtatcttactaaaccgctggggatcggcgtactgaccactgcagagaaaaaatcgctgctcaagccagagcatcaagggttagcgacggagaccatgtgccagatgaacctcgccggcgccgcgtttgccaccatcgacggggtgaaggcgatgaccgacgtcaccggctttggcctgctcggccacctcagcgaggtgtgccgcggggccggcgtgcaggcgcagctgcgctatgccgatatcccaaaactgccgggggtggaggactatatcgccgccggcgcggtgccgggcggcaccgggcgcaactttgccagctacggccatctcatgggcgagatgccgacggagtggcgggatctgctgtgcgatccgcagacctccggcggtctgctgctggcggtgaccccggaggcggaggcggaagttcaggccgccgcggcggagttcggcattaagctggccgccatcggcgagctggtgaccgcccgcggcgggcgacccatgatcgagatccgttgattcgatgcggttgtttattgcagaaaaaccgagtctcggtcgggctatcgccgatgtgttgcctaaaccgcaccgcaaaggcgatggctatattgagtgcggcaacgggcaggtggtcacctggtgtatcggccacctgctggagcaggcgcagccggacatctacgacagccgctatgcccggtggaatctcaacgatctgccgattgtgccggagaaatggcagctgcagccaaagccctcggtcaccaaacagctgaatgtcatcaagcgcctgctcggcgacgccgaggaggttatccacgccggcgacccggacagagaagggcagctgctggtggacgaagtactcgactacctgcagctggcgccggagaagcgtcagcaggtgcagcgctgtctgattaacgatctcaacccgcaggcggtggagcgggcgatcaaccgtctgcgcgccaacagcgagttcgtgccgctctgcgtgtcggcgctggcgcgggcccgcgccgactggctgtacggcatcaatatgacccgcgcctacaccctgctggggcgcaacgccggctatcagggggtgctctcggtggggcgggtgcagaccccggtacttggcctggtggtccgtcgcgatgaagagattgaaaatttcgtcgccaaagatttcttcgacgtgaaggcgcatatcgtcacgccgcaggaggagcgttttgtcgccacctgggtgccgagcgaagcctgcgaaccttaccaggatgaagaagggcgcctgctgcatcgtccgctggccgagcatgtggttaagcgcatcgaaggccagccggcaatcgtgaccggctataacgataagcgcgattccgaacccgcgccgctgccgttctcgctgtcggcgctgcagattgaggcggccaaacgtttcggcttcagcgcgcagaacgtgctggatatctgccagaagctgtacgaaacccacaaactcatcacctatccgcgttcggacagccgctatctgccggaagagcacttcgctggccgccatgcggtgttgaatgcgattgccgtccatgcggcggacctgctgccgcagccggtagtggatccggagatccgcaaccgctgctgggatgataaaaaggtcgacgcgcaccatgcgattatcccaaccgcccgcagcagccaggtgaagctcaccgataacgaagcgaaggtgtacaccctgatcgcccgccagtatctgatgcagttctgccctgacgcagtgttccgcaaatgccagattgatcttgagatcgccaacggcaagtttgtcgccaaggcgcgttttctggccgaggcgggctggcggacgctgcttggcagcaaagagcgcgatgaagagaacgacggcacgccgctgccggtggtggccaaaggcgatgaactgctgtgcgagaggggtgaggtggtggagcgtcagacccagccgccgcgccactttaccgacgccacgctgctgtcggcgatgaccgggattgcccgcttcgtgcaggataaagatctgaagaagatcctccgcgccaccgacggcctcggcacggaagcgacccgcgcagggattatcgagctgctcttcaagcgtggtttcctgagcaaaaaggggcgctatatccactcttcggaggccggcagggcgctcattcattccctgccggagatggccgggcgaccggacatgaccgcccactgggagtcggtgttgacgcagatcagcgagaaacagtgccgctatcaggactttatgcagccgctggtggggacgctgtatcaactgatcgatcaggcgcgcagcacgccggtgcgtcagttccgcggcctggtggcgccgggcggggcgaagaagtcgttcagcaaaggtaaagggaagccgaaaggcaaaaaagcggcagacgataccgcgccgccgccgcagtaacccgccggtggtcgcgaggatgcgttatcccgcggccaccgcttctccgccagtcaggccaatggtctacactaaacagccgggaagagcctggacgcggggcccctgagcaggggatgcccgctgcgcttttcctgatgccgatgccccatttctctcacaggcgataaggaggacccgtgaaatatattgctatcagccaaccgggcggcccggaggtattgcagatccgcgaaggggagatccccaccatcggggagcatgaggtgctcattgaggtgaaggcggcgggcgtcaaccggccggatattctgcagcgccagggtctgtatcccatgcctgagggcgtcacccccgtgcccggcctcgaggtggcgggcgtggttgttaaggtcggcgcgcaggtcacagcgtttacgcccggcgatcgcgtttgcgcgctgaccaacggcggcggctatgccgaatactgcgccgtgccggcaggccagacgttgccgatcccggcgggtctcagctttagcgaagcggccgccattccggaaaccttcttcaccgtctgggcgaatgtcttccagctgggtaagctgcagcctggcgaaagcattctggtccacggcggcgccagcgggattggcaccaccgcggtcctgctgtgccacgcgctggggatgaccgtctatgccaccgtcggccaggacgaaaaaattgctgcgctacgtccctatgctacggcgattaactacaaaaccgatgattttgccgagaaaatcggccagctgaccaacgatgaaggggtggacgtcattctggatattgttggcggcccttactttaaccgcaaccttgggctactgaaaaaggatggacgactggtcatcatcggctttatgggcgggcgaatcgctcatgaggttgatattcagactctgatgctcaagcgagccaccgtcaccggctcgaccatgcgcggccggacggcggcggagaaacagcagattgccgaggcgctgcgccgccacgtctggccgctgcttgaggcagggaaatgcaagccgctgatctacgccagctacccgatggcggagattgccgaggcccatgcctgtctggacagtggtcagcatctggggaaagtggtgatcacgatgacgtcgtgagacgcatcccggcgggctgccgccgggatggagttaggggaggttaaatcacgccctgggccagcatagcatccgcaaccttcacgaaaccggcgatattcgcgccgcgcacgtagttggtctgcttcgcttcgccgccgtactgcacgcaagcgtggtggatatccagcatgatgtgatgcaggcgggcatccactttttccgctttccagcccatgcgcgcggcgttctgcgccatctccagaccggaagtcgccacgccgccggcgttggccgctttgcccggggcaaacagcacgccagcttccaggaacaggtcggttgcggcgatggtggtcggcatgttggcgccttccgccacggccttgacgccattggcaatcagctggcgggcggcatcgacgtccagttcgttctgggtcgcgcaaggcagggcaatatccaccggcactgaccacggctgctggccttcaagataggtgaggccaaattcgcgggcgtaatcggccacgcggccgtgggcacgctctttaatgtcgatcaggcgggccagtttttctttggtgaagcccgcttcgtcaacgacggtgccgttggagtcggaggccgtcaccacccgcgcgccaagctccatcgctttctcaatggcgtattgcgcgacgttgccggagccggagaccgccacgcgagcgccttcgaagccgaggccgtgacgtttgagcatcgcttcggtgaagtagatcaggccgtaaccagtggcttccggacggatcaagctgccgccaaaggagagtcctttaccggtgaagacgcaggcgctgttgttggagagcttgcgcatcattcctgccataaagccgacttcgcgaccgccgacgccgatatcgcccgccggtacgtcggtatccgggccaaggtggcgatagagttcggtcatcagcgcctggcagaaacgcatcacttcgccatcgctcttgcctttaggatcgaaatcgctgccgcctttcccgccgcccatcggcagagtggtcagggcgtttttgaaggtctgctcgaagccaaggaatttgagaatcgacaggttaaccgacgggtgaaaacgcatcccgcctttatacgggccgatggccgagttgaactgcacgcgccacgcgcggttgacctggacctgattgcggtcgtccacccacaccacgcggaactggatcacgcgctccggttccaccagacgttccagcaaagcaagctgacgatagcgcggattttcctcaaggaaaggccacagggtggtcatcacctcccggacggcttgagcaaattcggtttgatgaggatcgcgctgttgaacgcgggtgagaaagccttccagagtgcacgtctgatccatagatatcagttccccttatggttgtggttgcatgtatttattatgattcggtccttgaaaaaaccgattttccgactataacaccgctaatccttaggcaagcaaggaaaaattgagccgacaacaaaatttataattgcccgctcgtcataactaaaagcgatgacgaggcggcgggcggatcagcggacggaaagggtggggcgctgggcgataaaggcgtgcagcagaggaatatcggccggggcgagatcgagggccagcgcttctgtgggaaggcaccagcgcagctgagtgtgatagtgggccagcggcgtgccctgaaagtgcggcacccaccaggcgtgaagatggatccggcggccggagacctcccgctgatggctagcgatatagcaagccgggcgggcgatgatgcccatctcctcctgcagttcgcggaccagcgcctgcggctggctttcacccggctccactttgccgccggcgaactcccacatccccggctggtcggcgtggggcggacgctgcgccagcagaatctggccatcctgttcaataatggcggcgacaacatcaatcatttttagcataagcatcaaggttaataagacgaatatggcctattatcaccgccatagaccgtaactgacaaccgccaaccctgctggagaccttcgtgcttgatagccacctgcatccgcgccttaaacccctgctaaacgctgtcgccggcgcccttgaccgccccggcatctcaccggacgggctgacgctggtcggttttgccatcggcgtgctggctctgccctttctggcgctggggtggtatggcgcggcgctggcggccattctccttaaccgcctgctggatggcctggacggcgctctggcgcggcggcgcgggctcacggacgcgggcggctttctcgatattgcgctggattttctcttttacgccctggtgccgttcggctttattctggcggatccgctgaacaatgccctggcgggcggctggctgctgtttgcctttatcggcaccggcagcagctttctcgcttttgccgccctggcggccaggcaccagatcgccaatcccggctacgcccataaatcgctgtactatctcgggggactgacggaggggacggagaccatcctgttgtttgtcctcggctgcctgtttccggcgcatttcgcctggctggcgtggctgtttggcgcgctgtgctggctgacgacggcgacgcgcatctgcagtggctaccagaccttaaagcgggtaacgaccacagcgtaaacggggtatcgcgcgtcgccgacaaagggcgacgcgctgaggcggggcgagttactgactgctttccgggccgcgctctccgcgggccaccggattgtgcgggttgctgctccattcgtaccagccgccgtcgtacaccgcgacgtgcggccagcccatggcgcgggcatacataaaggtttccgaggcccgccagccggtcccgcaatagaatgccacttgctggctcggcagaatgttccactggcgccacagggcagcgatatcgtcggcgctgcgcatggtgccgtcctggttatggaaatcctccatgtgcgtggagtcgctcccggcgtggccccagcgggcgccagcgatgtcgcccttcggcttgatatagctgtagccgctggtggtgccgataaactccggccacgagcggacgctgaccagcgaggcgtcctgacgatgcagcagcccgcgggcttgttcggtatccagcatcagctgcggctggccggggatcggcgcgccgaaatcaggcgccggctgctgcgccggtggcataccgcgctctaccggcagcccggcgtcggaccaggtctgccagccgccgtcaagcaggcgcacgtctttgaccccggcgtacagcatgatctgcgccacccgcgctgcggcgtagacgtcgcgaccatagaggatcaccgtggtgtcatgccggatgccgtgcttcgccagcatcgccttcagctgcgcgtcggacactttattccacagcggttcgctctccacctcattggtatcgatatagcccgcgccagggatatggctcagcagatagagcttcggcgctccccaggcggcttcaaacactttccaatcgcctgccggggcggcggcgaccgctttcccttgctgtaggtcgtgcagccactgggggtagaccagctgttcaaagtgcggcagcttttgcagacggtcggtctggctcagcgcatcgctcagggtgctgagccgggtgaaacccgtttgtttcagccgcgccgcgacgctggcgttatccgccgggctgccgtacagcgcgatgggggtatcggactggagctggtgctgcttagcccaggcgcgcagctgatcgtcgctcatggcgccgagccagcgggcggaaagattgagggcctgcggctcatggccttccgggccgttggcgcgctgcggccagccgttgtaataagcgctcagccgggtgtcgatggccacgccgtgctgctgttgcaggtgggagagagtgagcgctggcatggtttcagcggcgcaggtagtggaagcagcaagccccatgagcagggcgagtgcggtcaattgagaaacacgtttcatcgaaatgcccgacggtaaaaagtggagggcgtattctccgctcgccaggcgccgatttctttgcggtaacgcaggtttgcacgctattgtccttcattgccagcgctccatcgccaggcagcgccccgtcggcgggcagtcctcgcgatcgtgggtcaccaggatcgccggaatggcctggcggtccagttcttcaaagacccagcggcggaacccggcgcgcaggctggcatccaggcggctgaagggctcatcaagcagtaatgcctcggggcgcgccagcagggcgcgcagcaggctcacccgcgcccgctgcccgccggagagcgtggccggatcgcgcggggcgaagcccgccagcccggcgcggctaagcgcttcctccaccgcggtttttcgcgcctcgccgcgcacgttctccggcagcgccagctgtaaattttgcccgacgctgaaatggtcgaacagtaacgggtcctgaaacagaatgccgatgcgccgatgctctgtcggcagcgtatcgcaacgccgttcgttgagccaaagctcgcctcgggcgcgaaaatcgccggacagggcgccaatcatccaggcaaacagcgttgatttcccgctaccggaggggcccatcagcgtcagcacttcccccggggctaccgaaaaggcgacctcccgcagcagcggctggcgtctcacgctcagggtcagatggtttacggttagcactagcgaagtcctcgtcgatagcggcctgccagccaggccagcagagcagtcagggtaaagcataccgccggcagcagtaattgccacagcgcctgagcggcgagcgtctgcgcctcgccgccgctgctgagcgccaccgcctggctggtgagcgtcggaattcggccagcccccagccatagcgttggcagatactgcgcgatgctcactgagaagcccaccgccagggcggtcagcagtgggcgagttagcgaaggcagggttagcaaccagaaaatacgcgtggatccccagccgagcgtgcgggcgacaaccgtcagccgcggatcgcgctggcgccaggccgggcgcaaaataaacagcatccatggcaccacccacagcagatggccccacaggacggtccgccagtcaccgtcaagccaggcgtacagcgccaaccggtactggccgtcggccagcggcagggccggcaggaccagcggtagccagacccagccatcgcctcgcgccgggccgcaggccagccacagcaggcagacagccgcgccgagggcgcaggccgccagcgccagcccaaggctgttgccgagggcatccatctgcggcggcgccgagcgcgccagccccgccagcaatagcgcgcccagcagaccgctcagcggcagcagcgccgccagcaggcggccgggcagggcatgaggatgcgggtgacgaacaccgcgcagatcgggctggtactggcgctgtagccgccatccgccccaggcgaccagcgccagcccgccgaggatcgccatcagcagcaggctggccagcgcccctttggcctgctgcagctcatcgccctggcttaaccattgccacgccagcacggcgagggtgggcggattgccgggccccagcaccagggcgacgtctaccgccgacaggctccaggcggtggtggccagcagcaccatgccgagggcgggcagcagggcgggcagcaccagccaacgcaggcactgccagcggccgtagccgaggctcttcagggcggtcgcctggtcggcgaggcgtttctctcccagcaggccatagatcacccacagcacaaaggcgctctctttcagggccatcgtcaggccaagcccgatgccgtaccggtcaaccggcggcgtcagaaacggcaactgctgccagagccagcccccttcggcgaacagcagcagcgccgccgtcgccagggcgagatggggcaccgccagcagcagcggcagacgggaagccagccgccgccagcgggccgaaggccagagggcggcgacgatggtcagggcgatcagcagcgcgccgccgacggataacagcgtggagacgagggtggcggccagcgcctggctcagctgcgggtcggcgaacagcgcccgccagtgggccggggagcgcgcagcgcccaccagttccccggcggcggggagcagcggcagatagatcgccgccatcgccccccaggccagcaggatcagtgggtaccgtagcggcgcagccattcctgctccagcgcgtcaacccatgccgcgtgaggctcggcaagcaccggcggcagatcctgcggcagggctgccgccagcgcctggcgctggccgtcaggcagacgctgcggatccagtacgctcggatcgccccagacggcggcatcggccttgcgcaattgcgcctcaggggagagcaggaaattggccactactttggcgccagcgacagcgcgggcgttagccgggatggtaacgaaatggacgttgccgagggtccccacggtaaagccgaagctgtagctgtccgtcggtaattcgccgctggcggctttctgccgggcgtgcagcgggttaaacgtcagcgacaggcggagggtgccctggttgagcatggcgtccatccgcgccggcgacgccgggaaatccttgcccgcccgccacagggccgggtgcagcgcatcgagatagcgccacagcggggcggtgaccgccgcgaaggtcgccggctgcggcggctggcgcagggcggctggctggtcggtgagcgcgatcagcagttgctccagcagggcggtaccggtgaagtccggcggccgcgggtaggttacgctgcccggatgggctctggcgaaggccagcagcgcctgcgggctggtgggcggctgcggtgtttgtccgcggcgggcgataaacgtcagctgggcgctgccccacggcgactccgcgccctcggtggcgactgaaaaatcttcccgtaccggcttttgcagatcgacatagcgccagttgggcagcgattcggcccagccggtgagcagcaggttggcctgtttaagcgtgcgaaagttttcgccgttgatccacagcagatccactgacccgccctggcgacgaccggcctgcgcctcggtctggatgcgtttcactgcgtcggcggcgtcggcgacaggcacaatacgcaggtcgattgcgtaatagcgtttgacctcttcgctgacccacgccagatagcgattgacggccggatcgccgccccaggcgttaaaccagacggtctgtccgcgggcttccgtctgaatctgccgccagctgtcgtcggcattaaccgccagcggccagagcagcagcaggcacagacagaggctgtaatcacgcaaacggcgcatcgttactccttattctgcgaggaagaggtgggtatctggcacaacccctgagccgggatcgccatcgcggcattgaaccgcgctgataaattttgcaggccgatcagggcggtcagctcggtgagcgcccgggcgtcaaaatgcgcggccatcgcgctacgcagggcatcatccaccgccggcggcgtctgggtggcggcttcggcataggccagcgccaggcgctctttttcgctgaacagcgtactgctgcgccagtcggcgaccgccagcagcttgtcctggctcccgctccgcgccgcgagggtcatgctggtgatatcgatacagaattcgcagtggcacagctgggcgatgcgggcgctgaccagcgagcgcagcaccggatccagcggcgagcggcggcgttcaatatagcccacgaacagcgaaaccaggtaaaacagccacgggatccgaccccaccagcgaatggggctcagcacctggccgtaatgccggcggtgcagccaggcctgcggacgaaggatcagggggacagaatccagcgggggtaagctcatggcgacgatctcttatgacgttcacggtaaatatttttggcgatagagatgaccaacgccagggcaaaaagcagcgaaagcccggtggccagccagaaggtgcccccggtgagcagactcccggcccaggaatagacgatagtcgccgggagctggcccacgccggtggccagcataaagggccagaagcgcagcgaggttagtccggcggcatagctgaccgggtcaaacgggacaaacggcagcaggcggcagaccaggatcgtctgcgggccaaagcgggtgaaatagccgtcggcactgcgcagcaccgcgcggccggtgagtttctccaccacttcgcgccccagcgctctggcgatgcagaagcaaagccctgccccagccatggcgctgaaccacgacagcgccccgccccagaaggcgccgaacagggcggcgttcgccagggtaatcaggaaagccggcagcggagcgacgatcgcctggaggatcatcagcgcaaatgagaccagcgcggcctgcggcccccaggcggcgataaaccctctgacctgctgcggatccagggaggctaacgccgtcagactctgctgcagaaaggtacgcccgccagggaaccacagccaggcggccagagcggcggcgaccacgacggcaagggccagccgggcgcggcggaggtgacggcgatcaggttgggtcatggcgcacctcctcactgcacgccgccacgcgacgggcgcgggcaaaccgtttacctatctgcaccagggcaaacagcagcccgccggcgaggctcagtttgagcgcgaaggcgagggtcaccccctcgcgggccagttcgctggccatcaccgaatagatgaccagacccggcagggtggtcacggccgagatcagggtaaagggccagaagcggatcgccgtcaggccgtaggcgtaattctgaatattgtagggaaagagcggcaccaggcgggtgaggatcaggaaatcgcagccgctgtgggcgataccgcgctcaatcgcctgaaagacggtggtatggcccacatagcgctgcagcagatcgcgtccaagccagcgggcgattaaaaacgacagcgaagaggcgagggtggcggcggcaaacgagagcaaggagcctgttagcgggccgaagagcatcccgccggcgatcaccagcaggctgccggggatcagacacagggtggcaatgataaacagcgcagcatagaccagatatccccaggcgccctgatggcggagggtgtcctgaagcagatgcaggtgagtcagcagatcgtggagaccgacgcggtggctgataacggccagcgtggccaccagcgcgagaagtcccagccctttaccaatggccggatgacggcttcttttgcatgagaggtgctcctgtacagtctggacgcggtggacatcaaaaagtgcgcgcgacagtatcctgttccggcgaccgtcacaatggtttaccgtcgctttgttgattttgctcaggaaattctgccccccgcacagcgggaggcgagagaagggcgtgaattatggccggaaggtggcccacaccggcgcgtggtcggacggtttttccatcccgcggatctcgtaatcgatcccagtttccacgcagcgctgcgccagaggctggctggccagcagcagatcgatgcgcagcccacggttatcgtcgaagcctttggagcggtaatcaaaccacgagaaatgctcatgattgtcggggttagcctgacgccaggtatccaccaggccccagcccagcaggcggtccatccattcccgttcttccggcaggaaggaacatttgccggtgcgcagccagcgtttgcggttctcttcaccgataccgatgtccagatcggtaggactgatgttcatatcgcccatgatcagcaccggattctctttgttgagttcggtctccagatagttctgcagattctgatagaacgccgctttggccgggaatttggtttcatgatcgcggctttcaccctgcgggaaatagccgttaatcactgtgacgttgccgaagggcgacgggatctccgccataatgatgcggcgctgagcctcttcgccatcgtccgggaaaccgcggcggacggcaatcggcgtctctttggtcagcagcgcgacgccataatggcctttctgcccgtgataaaagacgttatagccgagcctggcgacctcttcgagagggaacatgtcgtcgtgaactttggtttcctgcaggccaatcacgtccggctggtgtttttcgacgatggcggccagttggtgtgggcgggcacgcaggccgttgatattaaaagagacgaatttcatagtcgctgccactgtgcaaggtgaatagtgcagggatggtagcagaaattcgccaggctggctgccaccggatgcgtcattctgccaatcgctgcgcatgagcgtgccgtgggtgccccttttgcgggcatgtcgcgccaaaaaagggcaaatatctacgataaatttcgcagaggatcacaattacagaattatatcttaccgttgcataatttatcttatttaatcactgtttatccccctttgtcggatacttattcactaaatatgcattttatgtgaatagcgttcggctgtaactcattgattccgcgttatctcatccgatttatgcatttttatcgctggctggcacgaactgtgcaatctacatttacagcgtaataactcatatttattaacattattgctacttttaatttaccggaagaggtcgatatgtctcagtcaattacgcgtaaccactttgatgaatggatgatgccggtctacgcgccagcggcgtttattccggtgcggggcgccgggtcacggctgtgggatcaggagggcaaagagtatattgattttgccggcggcatcgccgtgaacgcgctggggcatgcccatccgcgtctggtgcaagccctgaccgaccaggccggcaagttctggcataccggcaacggctacaccaatgagccgatcctgcgtctggccaaaatgcttatcgatgctaccttcgccgaccgggtcttcttctgtaactccggcgccgaggccaatgaggcagcgctcaagctggcgcgtaaatatgcccacgatcgctttggcagcgagaaaagtggcatcgtcgcctttcagaacgctttccacgggcggacgctgttcaccgtctcggcgggcggtcagccggcctattcccgggatttcgccccgctgccgccgcagatccagcatgccgtatttaacgatctcgagtcggcaaaggccttaatcaatgaccagacctgcgcagtgatcgtcgagccggtgcagggcgaagggggcgtggtgccggccagcgtcgagtttttacgcggcctgcgtcagctttgcgaccagcacaacgccctgctgattttcgatgaagtgcagaccggggtcgggcgtaccggcgagctgtatgcctatatgcactacggcgtgacgcccgatgtgctgaccaccgccaaagcgctgggcggtggtttccctatcggcgcgctgctggcgacagaggcctgcgccagcgtgatgaccgtcggcacccacggcaccacctacggcggtaacccgctggccggggcggtggccggcgaactgctgtcgatcgtcaacaccccggaagtgctctccggcgtcagacagcgccatcagtggttttgtgaacgcctgcaggcaattaacgcccgctatggcctgttcaaggagatccgcggcctgggactgctgctcggctgcgtgctaaacgacgcctgggccgggaaggcgaaaaccctcagtaacctggcggcggaagagggggtgatgattctgatcgccggcgccaacgtggtgcgtttcgcgccggcgctgaacgtcagtgaagaagaggtgaacagcgggctggatcgcgtcgagcgggcctgcgcgcgtttcgtggcaggagtctcatcatgatggttattcgaccggtggagccgggcgatttgcccgggctgctgaagctggcagcggagaccggcggcgggctgacctcgctgccggtggatgaagcgaccctcgcggcgcggatcgcccgctcgcagcagacctggcgcggcgagctaccgaaaagcgagcagggctatgtctttgtgctggaggagagcgaaagcggcgcggtggtgggcatctgcgcgatcgaggtggcggtggggctcaacgatccctggtataactaccgggtcggcacccaggtccatgcctcgaaggagctcaacgtctatcaggcgctgccgacgctgtttctcagcaacgatcataccggcagcagcgagctgtgtaccctgttcctcgacccgcagtggcgcaaagagggcaatggttatctgctgtcgaaatcacgcttcttatttatggccgcctttcgcgagcgcttcaatgagaaggtggtcgccgagatgcgcggggtgattgacgagcagggctactcgccgttctgggagagcctgggcaaacgctttttcgccatggagttttcccgtgccgactacctgtgcggcaccggacagaaggctttcattgccgccctgatgcccaagcatccgctatatatcgatttcctttcccctgaggcacaggcggtgatcggcaaggttcatccgcagaccgccccggcccggacggtgctggagaaagaggggttccgctacctgaactacatcgatattttcgacggcggcccgactctggagtgcgacatcgatcgggtgcgggcgatccgcaaaagccgtctggtgaccaccgaggcaggtgaaaccccgcccggtaactggccgctgtgcctggtggcgaatgaacagtatcaccagttccgcgctctgctggtacatgccgatccggatggcgagaccctgaccctcagcgcccgcgaactggatatgctgaagtgtcatgccggcgaccaggtgcgcatggtgcgcctgatccctgaggagaaaactgcatgagtctgtggattaacggcgagtggcggcccggccgtgggccaggtttcagtaaacaggatccggttaacctgaaggttgtctggcagggcgaggcggcggatgccgggcaggttgccgaggcggtggcggctgcccgccaggcgttcccgtcctgggcgcggctgccgtttgccgcccgtcaggcgatcgttgaaaagtttgccgctctgctggaagccagtaaggcggagctgacggcggttatcggcgccgagaccggaaagccgcgctgggaggcggccggggaagtgacggcgatgatcaacaaggtggcgatctcggtgaaggcctaccacgtccgcaccggcgaacagcacagcgacctgcccgacggcgccgccacgctgcgtcaccggccgcacggcgtactggcggtgtttggcccctataactttcccggccatctgccgaacgggcacatcgtgccggcgctgttggcgggcaataccgtggtctttaaacccagcgaactcaccccgcgcagcggcgaagcggtggtgaaactatggcagcaggccggcctgcccgccggggtgctcaacctggtgcagggcggtcgggaaaccggcgaggcgctcagcggtcaggcggatatcgacgggctgctgtttaccggcagctcaaccaccggttttcatctgcatcgccagctggccgggcaaccgcagaagatcctcgcgctggagatgggcggcaataacccgctgatcgtcgacgatccgcgggacgtggatgccgtggtgcatctgaccatccagtccgcctttattaccgctggccagcgctgcacctgcgcccggcgtctgctggtccgacgcggagaggcgggcgatgccttcctctcccggctggtgacggtgagccaacggctgatcccggcggcgtgggacgccgagccgcagccgtttctcggcgggcttatctctgaacaagccgcgcagaaagtgcatcaggcctggctgcagcgggtcgccgctggcgcggtcaccctgctggagccgcggttattgcaggccgggacgtcgttgctaaccccggggattgtcgacatgagcgacgtggccaatgtcgaggatgaagaggtgtttggcccgctgcttggggtctggcgctacgacacgttcgaggaggcgattgccttagccaacgctacccgcttcggcctctcctgtgggttaatctccccggaacgggagaagttcgatcgactgctgcttgaggcgcgggcagggatagttaactggaacaaaccgctgaccggggcggcgagtaccgcgccgttcggcggcaccggggcgtccggtaaccatcgtccgggggcctggtatgccgccgattattgcgcctggccgatggccagccttgaatcgccgaccctgacgctgcccgccagcctgagcccggggctcgactttctggccggggaggcgtcatgaccgcccgcgaagtcaactttgacggtctgctcgggctgacccatcactacgccgggctctcctttggcaatgaggcttccacccggcatcgctatcgggtgtctaacccgcagctggcggcaaagcaggggctgaaaaaaatgaaagccctcgccgacgctggctacccgcaggcggtgatcccgccgcaggagcgtcccaacgtgccgcttctgcgccagctgggctttagcggcagcgatgagcaggtggtggcccgggtggcgcagcaggagccggatctgctgtcggcggtgagttcggcctcggcgatgtgggtggcgaacgcggcgacggtgtgtccctccgccgattcgctggatggcctggtgcatctgacggtggcgaatctgcaggataaattccaccgcgccagcgaagcaccgactacagaggcgctgctgcaggcgattttccccgaccgcacgcgatttgctatccacccggcgctgcccgcctcggcctggtttggcgacgaaggggcggcgaaccataatcgtctcggcggcgagtatggcgctcccggcgtccagctctttgtctatggccgccgccgggggagcgaggaggcgccgcgtcgctatccggcgcggcaaacccttgaggccagccaggcggtagcgcgcctcaatcaggtcaatcaccgccagctgatcttcgcccgccagcatccggcggcgatcgacacgggggtttttcataacgacgtcatcgcggtgagcaaccgtcaggtcctgttctgccatgagcaggcctttgccgaccagaccgcgcttctccagcagctggcgcagcgggtgccgggttttacgccgctggtggttcccgccagccgggtctcggtggcagaggcggttgccacctatctgttcaacagccagctgttgagccgggcggatggcagcatggcgcttatcctgcctcaggaagcgcaggagcatgccggcgtctgggaatatctcaatgagctgctggccggggataaccctatcgccgacctgcgggtgttcgatctgcgcgagagcatggccaacggcggcggtccggcgtgcctgcgcctgcgggtggtgttgacggccgaggagtatcaggcggttaatccgcacgtcctgatgaacgatacgctgtttgccacccttaatgactgggtggatcgcaactatcgcgatcgtctcacccaggccgacctcgccgacccgcagctgctgcgggaagggcgcgacgcgctggatcggttgacccagatcctgcagctcggttcggtttatccatttcagcaataagggggcgcggtggaacattttctggcattaaccctggcggggcgattgccccatcactttcacggcgagacggcccatttccgctggcactggctcggggaagggatccttgagctgacgccgcatgcgcgctgcgagcgcgggctggtactttcctgcgccattcatggcaacgaaacggcgccggtggagatagtcgaccacctggtgcagcgactggtccgggaggcgctcccgctgcgctggcggctgctggtgatcgtcggcaatccaccagcgctgcgggcgaataagcgctatctgcacagcgatatgaaccgtatgtttggcgagcgctggcggcagtttccgctcagtgaggagacgcagcgggcgcagcggctggagcaggcggtggcccgcttttatcgcgaccacgatggcccgcgctggcacctcgatctgcataccgcgatccgcgggtcgctacatccgcgcttcggcgtgctcccggcccgcgatacgccgtgggaggaggattttcttcactggctgggcggcgccgggctggatgcgctggtgtttcatcgccagcccggcgggaccttcacccacttcagctgcgaacggttcgcggcgctggcctgcacccttgagctgggcaaagcgctgccgttgggggaaaacgatctgacgcagtttgccgccgtccagcgggcgctctcccggctgctggtgggggatctggccattgccgacgccccagcgccgctgcgctaccgggtggtacagcagctaacccgccatagcgatgatttccgcttgcatatggcggatcagacgctgaacttcacccccttcgaacccggcacgctgctggcggaggagggcgagacgcggtatgtggtggggcctgagccggagtatgttctgtttcctaacccgacggtggcgaaaggactgcgcgccggcctgatgctggagaaattatcctgagggcaagccgtccgccgggcggcctgctttattgcgcgcgtcttttttcgccatcttattttttcgtgctccagtgtaaatttgcagattattcctggtaaaatgctttgtttttaatcttccctactttatactctccataatttctctgcaaaacagtaagttatttattttttattgcaattcttcggctaaattccttattttctccataattggcgagaaactgttttttacactttcattgttttactcttgctctgactaattgacgattaacgtcgtaaagttaatctcgtcaacacggcaacgcgccgtaagaataacgtaaagtaaggattgaatgatgaagaaactcactgcactgtttgttgcctctactctggctctgggcgcggctaacctggcacacgccgccgaaaccaccaccgcgccgagcgacagcaagccgatgatgatgcatcataaaggcggcccgggtcagcatgacatgatgtttaaaggcctgaacctgaccgatgcgcagaagcagcagatccgcgacatcatgaagagccagcgcgaaaatatgaaacgtccgtcccttgaagaacgccgcgcgatgcacgatctgatcgccagcgacaccttcgataaggcgaaggcggaagcgcagatcgataagatggaagcgcagcataaagcgatggcgctgtcccgcctggaaacgcagaacaagatctacaacattctgaccccagagcagaaaaaacagttcaatgctaattttgagaagcatctgacagaacgcaacgcgccggcaggtaaaatgcctgcacctgctgaataatgtagcgcactgaatcaagaccgccggtcttgcccaataatgccatcaggcgttgggcagggccggcggttttttattggtggcttctcagccaagcggatgcagcggatagtctccgctgagcaaaggcttacagaggatcttgtaaccatcctggtcaaatccggcgggcagacgggtcaactccgccgcctggtcgagcgattcaacggcgcccagccacagccagttatgaatgacgtgatactgcgtcatgtccgggccgcgctcctccagcgccacgggccccgcccacggccagcacaccagctgcagtctgctcatctgcgccagcaggcgctctctgtgcgcctccacgctctcctttccacagcaggccccggcgcagcggcccagcgcggagcgaaagcaggcgcggccgcggctgagcggttccagaccaagcaggccataacagaggcgctgttcgtcagcgaggctctgcagcatctgcagcgccgcccgccggttggcgaacaggccatagagatgctgctggtgcgagaaatcaacctcacgggcatagacaatctgcggccggtcgtccgcaagtagccaggcgcagagctgcttgttacgccgtagccgcttgttaaacagcggctgctgctctttaatcaaccgcgcctccagcagcagcgctcccagctcgccagcggtgcgctgccaggtgatacgccgcgactgacgcagcatcgcggcctcttcaggggtgcgcaggtgggataacacccggctgcggaggttgacgctcttaccgatatagagcggcatcgtgtcgctgtcgccgtgaaactgatagacgcccggcagcttcggcagcgcctccagccacgggcgaagatgttcgggatattcatagatcgccgccgcctcaaactcgagacgcggggctgattgctttctggccacaataactcctgatactgtctatccatccagtatagcaggccatttttgcggcgaaaaggacaaaaaataaccccggcgcaggccggggcggggggagagactattttttccagaaatcgtcaaagacggtgatcggcggccgacgcttgtgttcggttttcagataccagccctcgatcgttttggcgatgctcgggtccagcgttttgccttccagataatcgtcgatgttctcgtaggtgacacccagggccacttcatccggcagggaggggcgatcgtcttccaggtcggcggtgggcagcttcttatacagatgttccgggcagccgagatgggccagcagctgtttgccctgacgtttgttcaggcggaaaattgggttgatgtcggtgccgccgtcgccatatttggtgaaaaagccggtaatcgcttccgccgcatggtcggtaccgaccacaactcctttggtcattccggcgatgctatactgggccttcattcgctcacgggctttttcattgccgcgaacgaagtcgctcagttcgatgcctgcttcgcgcagcgcctgttcgctggccagcactgcagctttaatattgactgtcaacacccgatcaggctggataaatgcgatggcgtcctggcagtcctgctcatcagcctgcacgccatagggtaaacggacggcgataaactgcaggctactgtcgccggtttcggcacgcagttcgttaatcgctatctggcacagttttcccgtcagggtggagtcctgaccgccgctgatacccagcaccagcgatttaataaacgggtaggtctgcaggtatgacttcaggaaatcgacgctgcggcggatctcgcctgcgacatcaatctgcggctttgcgcccagcgcctgaataatctcttgttgtagcgtcatcgcgccctccgaaagtgaatctgtttggcaagctgttggcttaaagctacctctttgccgctgaaacgacaaggaccggggttttgactgccggaaaagaaggcaatcaatgacataggttttcattatagatgctgtaccgcgcattgcgccgccgtccgacgtcggcagatcaatcctgtttacgcaataacataacctgacatgatttcgctgttcggcttgaaaaataacactatttattccaggcttatcgttacacagtagaaaagaggaaccaaaatgaacaaaagcttagcaggaatactgggcgtcaccgtcgcgttaaccttactggcgggctgtaccgcttacgatcgtaccaaagaccagtttacccagccggtggtgaaagatgtgaagaaagggatgtcgcgtcagcaggtgatgcagatcgccggcaaaccttcaacggaagtcaccatggtccatgcccgcggcacctgccagacctatatcctcggtcaacgagatggtaaagttgaaacctactttgtggccctcgacgaaacgggtcacgtcatgaactctggctaccagacctgcgccgagtatgataccgacccgcgcaacgccaggtaagcttcctactgtttactgacttctacgtaagcccgaccactggtcgggcttttttgtgagtcatgatgcttatttaattgcgcgaattatttggatgaaaatgtgagggtagtcaaaaccggaggtcaatgagagacaattctgttcaacagcgaattatcctggcggctcagcttgccgtatactcaactcataaacagaattaaccggatgttaccagtcttaccggctctcagcggttactgaaggccctggtctcacacattgaggaagcgttcatggaaaagaaacacatttatctcttctgctcggcaggcatgtccacgtcactgctggtctccaaaatgcgggcgcaggcggaaaaatatgaagtcccggtcattattgaagcctatcccgaaaccctcgcgggcgaaaaagggccggaagccgacgtagtattattagggccacaaattgcgtatatgttaccggaaattcagcgcctgctgccgaataaaccggttgaagttatcgactcccttctctatggcaaagttgatggtttaggggtattgaaagccgccgtcgcggctattaagaaagctgcagcacaataattttaacttttaaaactcgatgtattttgacgcctggcggctgcctgttgccggacgtcaaaaaataatgagtttattttcccgtcaaagagtaatttcatacatcatcgccgtaatagtttattgcggcttttaagggtattgactatgagtaaagtgatcgattcgcttgaaaaggtactccttccttttgcagtgaaaataggaaagcagccgcatattaatgcaataaaaaatggatttattaaattaatgccgttgaccctcgccggggccatgtttgtgttaattaacaacgtttttctgagcttcggcgaaggctctttcttttattccatgggcattcgcctggatgcctccaccattgaaaccttaaacggctttaaggctatcggcggaaacgtctataacggcaccctcgggattatgtcgctaatggcgccgttctttatcggctccgcgctggcggaagagcgcaaagttgacccgatggcagctggcctgctggcggtggcggccttcatgaccgtgaccccgtatagcgtgggcgaagcctatgcggtgggcgccaactggttgggcgggcagaacatcatctccgggatgattatcggtctggtcgttgcggaactgttcaccttcgtgatccgtcgcaactgggtgattagactgccggacagcgtgccggggtcggtatcacgctctttctcagcgctgatcccgggcttcttgatcctctccatcttcggcattatctcgtgggccctggcgagctatggcagcaacttccaccagatcatcatggactctatctcgacgccgctggcggcgatgggcagcgtggttggctgggcatacgttatctttaactctctgctgtggttcttcggtgtgcacggttctctggcgcttaccgccctggataacggcatcatgacgccgtgggcgctggaaaacatcgcgctgtacaaccagtacggctctgttgatgcggccatcgaagcgggcaaacagttccacttctgggctaagccgatgctcgactcctacatcctgctgggtggctccggggcgacgctgggtctgattatcgccatctttatcgcttctcgccgcgctgaccatcgtcaggttgctaagctggcgctgccgtcaggcatcttccagattaacgaaccgattctgtttggtctgccgatcatcatgaacccggtgatgttcatcccgttcgtgctggttcagccgattctggcggccattacgctggcggcctacagcctggggattatcccaccggtgaccaacctggcgccgtggactatgccgaccggtttgggagcgttctttaacagtaacggcagcgttgccgccctgctggtggccctgttcaaccttggcgtcgctaccctggtctacctgccgtttgtggtgctgtcgaataaagcgcagaccgttatcgagcaggaagagagcgaagaagacatcgctaacgcactgaaattctgataccgcgcggtacgggcagcgtcccgtaccgcctgataaatgagggaaatattatgtttgatctggacaacatcgacgcggtagagaccccggaaaatgacctcgaagaggtagtgatggggctgattatcaactccggacaagcccgtagcctggcctatggcgcgctgaagcaggcgaagcagggcgactttgccgcagcgaaagcgatgatggagcagtcgcgccaggcgctgagcgaggcgcatcgcgtgcagacccagcttatcgaaagcgacgagggcgaagggaaaatgaaggtcagcctggtgctggtgcatgcccaggaccatctgatgacctccatgctggctcgtgagctggtggccgaattgattgagctgcacgagaaggtacaataggccatcgcgacgatgaggcagcccagaatgatgaccaccgagatcagtaccgccagagaacaacagctgttcaacgggaagaactttcatgtggtcatctataacaaaacggaaagcgtgagcgggcttcaccagcatgattactacgaatttaccgtggtgttaaccgggcgctattaccaggagatcaatggcaaacgggtgctgctggagcgcggggatttcgtctttatcccgatgggctcgcaccaccagagcttttacgagttcggggcgacgcgcatccttaacgtcggcatcagcagacgcttctttgagaaacactacctgccactgctgccgtttggtctggtggcttcgcaagtctacgccgtgcagagcgcttttctcggctacgttgagtcggtcatcgcctcactcaattttcgcgaaacggaatttgacgaatttatcgagctggtctccttttatgtcattaaccgtttacgccactatcgtgaagagccggttgccgacgtgacgccgcaatggttaaaaaataccgtggaagccatgcatgataagctgaaattcggtgaaggcgctctcgaaaatatggttcgcttatccggaaaaacgcaggaatatttaacccgggcgacccagcgctattatggtaaaacaccgatgcagataattaatgatatccgtatcaactttgccaaaaaacagctggaaattaccaattattcggtgacggatattgcgtatgaatcaggttacagcagcccgagcttgtttattaaaacctttaaaaaactgacgtcgtttacgccgagcagttatcgcaaacatttgaccagtattaattaaacccgcgcggcgttcgccgccaggtttataccgaaaatcattcaagttaactgtccgcattgttgcggagagcggcctgcgtccaggcgcagcgcctaagggagaaaaagatgagccagaaattaaaagtagtcactattggcggcggcagcagctataccccggaattactggaaggatttctgaaacgttatcatgaactgccggtaagcgaactgtggttggtagacgtcgaagagggccaggagaagctcgatattatccacgcgctgtgccagcggatggtagaaaaagccggcgtgccgatgaaagtctataaaacgctggatcgccgcgcagcgctgcagggcgcagatttcgtcaccacccagctgcgcgtgggccagctgaaggcgcgtgaaaaagatgagcgcatcccgctgagccacggctacctgggccaggagaccaacggggcgggcgggttgtttaaaggactgcgcaccatcccggtgattttcgatatcgtgaaagatgtgcaggaaatttgccccgacgcatggatcatcaacttcaccaacccggcgggcatggtcaccgaggcggtctatcgccacaccaatttcaaacgctttatcggcgtgtgcaacattcctatcggcatgaagatgttcatcaccgacgtgctgcagctgagcccgagcgatgagctgaatatcgacctgtttggtctgaaccacctggtgttcgtccgcgacgtgctggttaacggcgtctcgcgcttcgatgaactgctggacggcgtggcctccggccgtctgaccgcgaactcggtgaaaaacatcttcgacctgccgtttagcgaagggctgatccgctccctgcgcctgatcccatgctcttacctgctctactactttaagccaaaagagatgctggcgattgagatgggcgagtactacaaaggcggtgcgcgcgcccaggtggtgcagaaggtggagaaacagctgttcgagctgtataaaaacccggatcttaacgttaagccgaaggagctggagcagcgcggcggggcctattactctgatgccgcttgcgaagtaatcaatgccatctataacgacaagcagactgagcactatgtgaatatcccgcatcatggccatgtcgataatatcccggcggactgggcggtagagatgagctgcaccttaggccgcgacggcgcgaagccgacgccgcgcattactcatttcgatgagaaggtgttagggcttatctacaccatcaaggggttcgaagtggcggccagccaggcggcgatcagcggtgagctgaacgatgtcctgttggcgctgaacttaagcccgctgatccattccgatcgtgacgccgaacagctggcgcgggagatgattctggcgcatgaaaaatggctgccgaactttgcggcgacgatcgaaaaactaaaatcgtaacgggagtagcaaatggaacgcgtattgatcgtcaatgccgacgacttcggcctcagtaaagggcagaactacggcattatcgaggcctgtcgcaacggcgtggtgacatcgaccaccgcgctggtcaacggcgcggccattgaccacgccgcccagctgggccgcagtactccggagctggcggtcggtatgcactttgtactgacgctgggcgagccgctgtcggccatgccgggattaacccgcgatggccggctgggcaaatggatctggcagcaggcggaagaagatagcctgccgctggaagagatcgcccacgagctggcgtgtcagtaccatcgttttgtcgaactcttcggccatgagccgacgcatatcgacagccatcaccatgtgcatatgttcgcccagatttatcccatcgtcgcggcctttgcccgcgagaagggcattgcgttacgcattgaccgccaggtggcggcgcagagtgggctcgaccagcaggcggcgcgcagcagcgccggcttcagcagcgagttttacggcgaagcggtctctgaggaactgtttctgcagacgctggatgcctccattgcccgcggggagcgctccctggaggtgatgtgtcatccggcttatgtcgatcggatcattatgggcagcgcctactgctatccgcgactggatgagcttgatgtgctgacagctgcctcgctgaaagcggcggtggccgaccggggttatcgtctgggaacctaccgcgacgtgtaagcccgacgggggaaagggaaagtgaatcaagcccggcacagcgtgccgggctttttactacgccggaatagcggcgattttcgggcttctcgaccacacgcggtgggccgtcatcagggcgagcagtttgtccgccgctggcgtgtcgagcgcatcggtgacgatgaccccctcttcaccctgggtcggaacatgcagaacggacgtcagctgccgcgcatcccctgccagcaggatcggcttcagatgtttataggcttccagcaggtaatagcgcgcgtcaccgctctgactcagggcgctgaggtcgccgccgggcaccaccaccgcatccaccgtcagcgacggggaaccggcgaaggtgccggcgatcggcagcggagaaccatcgtcggcaatgacttcgcccattcgcgagtagagcagcttgctgtgcacgccctgggcctgcagcgcctgcaggagctgaaccagatcctgcgctgaggtgcgttcgttgagcaggactgccaccacgcgacctttcacatctccttcggcatcggcgtagaggctgaggctggggtctttctccacgccattgaccggggcgggcagggtaatgttgcgctgatcgtcgctcagttcgatccctaagttcgccccaaccgcttccgcaagcttagtatcaatgtgggccagatgatcgaccacccgctcgcggatccaggtgcggaccactttgctgagttcgaagctgaaaccatcgataatatgctgctgttcaatcggcgtctggctcagccagaacagacgcggctgggcgtaatattcgccgaacgaagggctgcgctggcggattttttcgccgtcgacgcgctcggcgagggactcaaagccaccgcgtttggcggcaggcggcgtctcgcgcggccagttgtcgttaatcgagttgggctcgtagttggccggattggtgtcaatgtccatccggtgcatcccgtcacgctggaaattatgatacgggcaggtcggacggttgatggggatttcatggaagttcggcccacccaggcggctaatttgcgtatcggtgtaagagaagagacgcccctgcagcagcggatcgttgctgaaatcaatgcccgggacgatatgtccgggatggaaggccgcctgttcattttcggcaaagaagttatccgggttgcggttgaggaccattctgccaacccgctgcaccggcaccagcgcctcggggatcagcttggtgggatcgagcaggtcgaagtcaaaagcaaattcattctcttcggggatcaattgcaggccaagctcaaattccgggtagtccccggcttcgatggcctcccatagatcgcggcgatgaaaatcggggtcgcggccggtcagcttctgcgcttcatcccacaccagcgaggccttgccggcgaccggtttccagtgaaagcgaacgaaggtggctttgccctcggcattaatcagacggaaggtatggatcccgaagccttccatggtgcgatagctgcgcgggatgccgcgatccgacatcgcccacatcacgttgtgcagcgtttccggctgcagggaaacatagtcccagaaagtatcgtgggcgctctgcccctgtgggatggcccagtggggttcaggcttcacggcgtggacaaagtcggggaacttcatcgcgtcctggatgaagaagaccggtgtgttgttgcccaccaggtcaaaaatcccttcgtcagtgtaaaacttggtagcgaagccgcgaatatcgcggacggtgtccgccgaccccgcgccgccctgcacggtggaaaagcgtacaaacaccggggtgattttatcggctgacgaaagaaaatcggctttagtcaacgcagccaggcttttgtagggctggaagtagccgtgggcggcagagccgcgggcatgaacgatacgctccggaatacgctcgtggtcaaagtgggtgatcttctcccgcaggataaaatcttccagcagcgttgggccgcggctaccggcgcgcagcgaattctgatcgtcagcaatgcgcacgccctggttggtggtcagcggaaaatcttccccccctttgcgttgcgcctccagggaatccagtttgctgttatgagtatcgggcgctttcaggctgcctggggcggtgggttcgacgcccggagcggtaggtttcggcgtggggcgccactcccgatcgtccggcgccagcgaatcgagacccggctgcgcttcctcgctgtcgtggaccggtgcctgctgttggtgagggttcgggtgcttatcagacattactcgtctcctgctttcattgctaaaagtggtcgttgatagaccaaaacccttctaactatagaacattacgctgtctgcgcccggcgagggggcagggagttatcctaaaatgcgcatcggcggcgaaggggcgacgaacggggccacaatcggctatgatagaggtttctgtttcccgctatgtttagtgaatccatttgttatgaaaccattgcgccaacaaaatcgccctgtcattagctacgtgccgcgcgtggagcctgcgcccccggaacatgccgtgaaaatggaccattttcgcgatgtctggattttgcgcgggaagtatgtcgcttttctgctgatgggggagcatttccgtcgctcaccggcattcagcgtgccggagtcggcgcagcgctgggctaaccaggtgcgtcaggaaggtgagattgaagcctgagtcggctgcagaaataaaaaaaccgctgaatgatcagcggtttttttgtgcttgccgtttagcgatgcgccagttcggcttcttcctcgctatcgaagatcgacttgtcggtctggcgcagccactggctggtcagcgtcccggcggtcattgagccgttaacgttcagcgcggtacgccccatatcgatcagcggttcgacggagatgagcagggctaccagggtcaccggcaggcccatcgccggcaggacgatcagcgcggcgaaggtcgcgccgccgcccaccccggcgacgcccgccgagctgacggtgacgatgcccacgagggtggcaatccacatcggatccagcgggttgatgcccacggtcggcgcgaccatcaccgccaacattgccggatagataccagcgcagccgttttggccgatggtggcgccaaaggaggcggagaagctggcaatcgactccggtacgccgagacgacgggtttgcgcctcaacgttcagcggaatggaggcggcgctggagcggctggtaaaggcgaaggtgatcaccggccagactttacggaagtacttcagcgtgctgacgccgttaatcgccagcagcaggccgtggacgacaaacataatacccagcgcaatgtacgaggctaccacgaagccgccaagcttgatgatgtcctgcaaattcgacccggcaaccactttggtcatcagggccagcacaccgtaaggggtcagctgcatgaccagacgaaccagcttcattacccagccctgcagggtatcgatcgcggtcagcacgcgctggcctttttccacatcctctttcagcaacttaagcgctgcgacgccgaggaacgccgagaaaatgacgatgctgatgatggaggttgggttagccccggtcaggtcagcaaacgggttcttcggcacgaaggaaaggatcagctgcgggacgctgagatccgctactttccccacatagttgctctggatggcgttcagacgggcggtctccgcgctgccctggaccagaccctcggcggtgaggccgaacatattggtcaccagcacgccaaccagggcggcgatcagggtggtgaacaacagagtaccgatgctcaggaagctaattttccccagctgcgaggcattgtgcaggcgggccaccgcgctaaggatggaggcgaagaccagcggcataacaatcatttgcagcagctggacgtaaccgttgccgacgatattgaaccactggatggaatccttcagcacctggctgtcagacccgtagatcaactgcagcgccagaccaaataccacgccagtcgccagaccgaccagcacttttctggccaggctccactgtttatggcgtgtttgccccagcgcaaacagtaatacggcgaacacgactacgttcgctattaatggaaagttcatccccgttctcctgatatttttataacctgggctggtggataaccagctcttatgacggcaaggttagcagaaggcgttatcaaggacttatattcaaatggaatgggttataaccaaatggcgttttccgccgctttatcgcccactctggtgacttataaagcgattgaaggtgatctgcagggaattgatcaccccggatgaccagcgtatcgcgctgttgtccgccagcgtctgcggcatccagacggcatagacgaacagcgccatacacaaggcgcgttcgagctgattgcccttgcgcggcgcaaggatcggcagccggaagcgccagcgacagggccacagcagcggcacaccggcgggggtgagcatatcggcgagaatgtggctgagatagcccagcaccaggccctggagagcgtctgccgggacaatccagctgtcaggcactttcagatagaacagcgtcagcgcgccaaagacggccagcaggctgtgggtgaagccgcggtggccaaaggcccgcgccacgggctttgagatccagctcagccgttggccaagaaacgacttggggtgatcgatgtccggcagcaggcaggtcaaaaccgccgagggcacaatatgccaccagtcgccctgcgccagcaccggcgttaactctgcgtttttggcaaatactgcgcaggcgattgaaaagaagagatggccttccgccgtcatgataacacaccctaaactgtcgattcatacagtatagggtttttatacagtgtacggaagaggtgacggtgtaactctttgtcacaaactctcagcgcgccagccatccgccatcgacggccagagtatagccgttaatatagtcggccgctgatgaggcgagaaacaccaccggcccctgcaggtctttcggcgctccccagcgaccagcgggaatgcgctcgaggatcgcctggttacgctcttcatcttcgcgcagcgcctgggtgttgttggtggccatatacccgggcgctatggcgttgacgttgataccctggccagcccattcgttagccagcagacgggtcaaacccagcacgccgcttttcgaggcggtgtaggaggggacgcggatcccgccctgaaacgagagcatcgaggcgatgttaatgattttcccgccttccccctggcgaatgaactgcctggcgaccgcctggctgagaaagaaaaccgctttgagattcaggtcgatcaccgcgtcccagtcgctttccgtgaaggtcagggcatcatggcggcggataattccggcgttgttgaccagaatatcgacccggcccatcgccgccaccgcctggtcgaccagaccgctcatatcattctcttggctgagatccgcctgaatggcgtgaaagcggcggcccagcgccagcacctgggcggccgtatcatggggaattttacggttgatgccgacgatatcgcacccggcctgcgccaggcccagcgtcattccctgtcccaggccggtatcgcaaccggtcacgatggcgaccttacccgtcaggtcgaaggcgttcagtaccatattcacctctgtcagctgatctactggcgtacgatgacgccacctgtgaccagcatagagggaggaaaacaaaattacaattaaaatgaaacaatgttttgattttgttgccggcggcgtgacagcgattgttgcacccgccagcggtcttaaccgagcaagttctcagcagtgagtgccagcagtgacggaagcttgacgtccgccagcgcaaagcgcgggtcgcggctgttctccgcttccggcaccacgatagaccgcatgcgcgcggctttgctggcgatcatgccattgaccgaatcctccagcgcgacgcagcgctgcgggtcgactcccagggcagcggcgcagttgaggtagacctgcgggtgcggtttgctccagggtaaatgctccgcagaggcgagagcatcaaactggtcgcgcagttcaaacatattgagcactttctccagcatcatcagcggcgaggccgaggccaggcccacctttaagccctgagctttacacagggccactgcctcgcgtacgcccggcagcagcgggcgtgaggcttccaccagctcaatggcgcgacgaataatgcgcgcggtagcttccgcccggtctacgccgtgccacggctgctgcgcgtaccacagatccaccaccaggtcgattcgcagaccgagcaggtcgggcagttcatcgcggcgacgggtatccactcccaggctctccatgacctcgacctccgcctgatcccagagcggctccgagtcaatcagcaacccgtccatatcaaatatcgcggcctcaatgcggcgcttcgctgacatatgtccttctcctgttgcgtaatcagataaacgaatcggcaatcatggtatatcataccacgcattattgggcgaaattcgccgtggcagatagacttatacccgacatactcgggggagcgagggaagccagcgccacgcaacaggcagcaggcgaaccaccaacgcgtctttaacaaggggaactcatgacgtaccaacaagctggacgcatagcggttatcaaacgcattttaggatgggttatctttattccctccgtgctgtcgacgctgatttctgtgctcaaatttatgtatgagcacagtgaaaagaaacccggcattgatgctgtaatgatggattttgcgcacgtgatgattgagatgatgcgctttaacacgccgttcctgaactttttctggtacaactcgccgctgccggattttcaccatagcctgaacatcggcttctggatcatcttcattctggtgttcgtcggcatggccctgcaggcttccggcgcgcgaatggcgcggcaggcgaaatttcttcgcgaggggattgaggatcagctgatcctcgaacaggctaaaggcgcagatgggttaacccgcgagcagctcgctgaacgcattgtggtaccgcgccatacgatcctggtgcagtatttcccactgtacgtgctgccggtgatcgtgattgtcatcggttacttcttcttttcgctgctgggctttctgtaagtcaggtgcccggcaagccgggcaccttcttattccgctggcagaggacgtggttttccctgattatcaacggcaacgtagataaacagcgcttccgtcgccttgtagcgctggccaatcggttctgaagaaacttttttcacccacacttcgatattgattgtcaccgaggtgttgccgcgcttcacgcagcgggcgtagcagcacaccacgtcgccaacggcgaccgggcgtaaaaaggtcatcccatccacccgcacggtcaccacgcgaccctgggcgatctctttggccataatggcgccgccaatatccatctgcgacatcagccagccgccaaaaatatccccgttggcattggtatccgccggcattgccagggtgcgtaaaaccatttcgccctttggggcgagatctgttgttgtcatgctctactctgttgtggtcaaagacgatcagcgggatgctactatgaaaatagcgcagtgagaataggggaatacgcccgctggcgcgggcgcggtggttcagaaggagagggtaacgccggcgtaatacgcgcggccaggctcattgtaggtcgaggcgccggcattttcgcgatacagttgtttatcaaatagattacttattccggcattcaggcgaatatcccgatttagctgatactgagtaccaatacccacgatggaataggcgccaacctcggtggtggcaagggtcccggtttcgttgcggatctccgcatactgacgcggcttctgacggccataaagcgtccagttcacattcgcagacagggcgtcgtttacctgccagtcgagcatcgtgttaacggtatatttcgggataaccgacagcgggttgccagtctctttactttcagatttgagcatccaggtggcattggtccgccagctgaggacatctctcagcaccgggatcagcagatttccttccagcccctcgaccacggctttgccgccgttctgccattgcaaaatattattgccgctggaggtatagcccagtacctctgttccggagacgattttgtttttgtaatcgttgcgaaaccaggtgactccggcagcgtaaccattaaggttaaattcgataccgatctctttgttgatactgatctccgggtcgaggtcagggttacccagcagatagcagctgccttcagcgatcgtgtttggacaaccgttgccgcgggtggagagcaaatagcctttactggattgatagaggtttggcgctttaaacacgcgcgcgataccggccttcagcgtgaccatatcgccgagctcctgggacagattgaggctggggctccagttattgccaaactgattatgataatcgaagcgaatgccggggatcaggttggtgccgggcacggcttcgatattatcttccagatagataccggtgagggtggcgctgtttttggtactgcgttgcgtagggtcgcccgaggtcccagggatagtctcgccgttgctgttagtggcctgcatcgatgccgggtcgtcgagctgatcatggttccattccattcccagcgtcagcgtctggtccgccagccagaagaaaggcacattgaattccgaggtagtacgccaggattccagacggctggtggcataatcttcactgttgatcatgccttcgacgcggccggtagagccttcctgcaggcgggtattgttggttttctcgtagtaaacaccggctttggactggccccaatcccatagaccgttgtaggtcagtccccaggactggcgatagaggcgattagtttcgtggccgtacagggagtccaccagcccgttcgggctaagattgccgttgctgtactgggtatcgccagcatagatattcccttgacggctataggcgtagctgaaatcgagaatttgttgcggggtcattttccatgacagtagcgcgttaatgtctttattgcggaccccttcgcgccccgcagcgtaagagccgttttgcgcatggttaatatcccaggcgtcgggttccgttttattgatattgccatacaggcgcatcgtcagcgcctcgccggccagtgggccgctgagattgaagttagcgcgattggttgtgccttctttgttgttttccggctggttggtgaagaaagacagcgaaccgtgccaggtgttggtcggacgtttggtaatgatattgaccactccgcccgccgcgccggaaccatagcgcgcggctgccggaccgcggagaacttcaatccgttcgaccatttcggcaggtacccagttgctgtcgccccgggtatcgcgttcgccgcgccagctatagcgaaccgcgttacgtgacgtgaccggtaccccatctatcaggatcagggtgttctccggccccatgccgcggatatcaatctggcggttgttgccccgactgccgctggcgctgttgccggtcaagttcaccccgggcattttacggatgatgtctgagagatcgttgaccggcggctgcttagcaatatcctctgccgtgataatcgacaccccgggctgttgcttaagcgcctcttccgccgtactgcgcacaatcatcgtttcggtatcttgttctgattcttcagcaaaggcgttaggggcgaggagactggatatgaccagcgccagggtcgtgggcacagaatattgcggcgatctcatgtaaatatccttttcaaaacaatgcaaaatgagatcgagaatattaatgataacaattatcattacaatgtaacgagatgaatctccataaaatcctcacaattaccgcaactttttatgcagttgagagaaatcgtgaagagagcctacacagtgtggccgggaagctgtcagcgtatgcgctgaggttgtgtggttgcagggaatgtttgccagtgcagtaagcttatagggggcgagcgcggcgcgcgatggcgcgccggcggaggggttagtggtggtcgtcctgcggcatatgacggtagatgtagatcccgctcagcaaggtaaagaccagcgtgagggcggttaaaccaaagaccttaaagttaacccagatattctgcggcagccagaaggcgatatagatattggccagcccgcagagaataaagaacaccgcccaggccaggttaagtcgcgaccagacctgctgcggcaggctcagctctttacccagcatgcgctggatcagcggctttttcatcacccactggctgaacagcagcgcgccggcgaacagggcatagatcaccgtcaccttccatttaataaactcatcattatggaagaagatggttaacccgccgaagacggccaccagcacgaaggtgatcagcgccattttttccactttccggtagcgcacccagctgtagatcagcacgacggcggtcgccacaatcagcgccgtggtggcggcgtagatatcgtaaagcttataaaaggcaaagaagaccaccagcggtaaaaaatccagaaactgcttcatacatcgatcccgtctttcaggacggaccggggaaggccccggtcctggttaaaattagctgcggataagcatatacacgcggaataaatagatcagcaacagggcggaaatcaggttgctgatggtattaatcaccaccgcgccgacgtttggcgtcagggcggcaaagctggaagcaaacagtaacagcagggttttcgccaccagccaaccgataatagccggcgccaccagccgcagattggcccacgccaggcgcatgctgctgcgcatggcgccgaggatgcccatgttgtcctgtaccagcatgatcggcgcaaaggccagcacgatggccaacagcacgccgggcaccagcaccagcatcatccccatctgcaccaggaaggtggtgaacaggatcagcagcagcagcttgggcagcaccggcgccgaggcgccgatggcgcgcagggcgctaacgcgatgaccggcggacaccagctggatcagcagcaggacgccgccgacgaggatcgcattacctaccagacccgagaaggttgatgccgccgaggcgcgcagcagaacctgctgctgctccggcgtcatgttctgcaccagctcgaacagcccggcgctaccggcgaggttatcgccttcgctgagtatcgacagctgctcgtcgctgggtgaaaaggcatggccaagtactaccgtaataaacgcgcacaacagcgcaatcagtaaaatagtaatgaactgattacgaaaaaaattcccggtgtcacggtagacggacttcgccgtgatagacatgcattctccttgagtgtcgcaggtgttaactagccggcgattgtaccgcaaatcgttccgtcgtagcactctctgcgccggtcagggcaggtatatctttgtaaagaggccgcaatggtggcaggccgtagcgcgcccgcgcccggttgcaggcatcgttttcctcgccattttccccggacatggcgaattcgcgacacggcgaaggccggttttcataaatagtgcagtgaacggcgtcgccgatatcgccagacagggccgcgcagcggctctggcgctgattggtgccgctcatgcagcgcaggaaaggggtcagcggttcggtcagcgcggagggcaccaggccgcccgcatcgtcggcttccgcccagtagaaagagactcgaaaatacgcacaacaggcaccgcacgtcatgcacgggttgatttcactcataattacacctgaaaaaaacgcatcaacacagattgtcggcagttaacttatccagccgcctcagcgacggcaagaggggcagaaataaatttttgcgcgaaaagtgaaaattgatgtgcgaacaattcaaggcattgcgatcggtagcaaaaattaatctggatcaataaatgttaaatctgaggacttagtgtgatctaaaacagatcaaacgtaactcgttataggtatatttggccgcgctgaaaaaccataatgaggaagtggatatgaagaagttagcagcggcggcattgattcttggcacgctttctaccggcagcgtctgggcgcatgaggcgggggagtttttcattcgtgccgggaccgccaccgtccgaccgacggagggctctgacaatgtgttaggcagccttggcagtttcaacgtcagtaacaatacccagctgggtttaacctttacctatatggcgaccgataacattggcgtggagttgcttgccgcgacgccgttccgccataaggtcggcaccgggccaaccgggactatcgccaccgtccatcagctgccgcccaccctgatggcgcagtggtactttggcgatgcgcaaagcaaggtgcgcccgtacgtgggggccggtatcaactacaccaccttctttaatgaagactttaacgacaccggcaaggcggccgggctttccgatctgagcctgaaggactcctggggcgcggcggggcaggtcggcctcgattatctgattaaccgcgactggctgctgaatatgtcggtgtggtacatggatatcgataccgatgtgaaattcaaagccggcggcgtggaccagaaagtcagcacccgtctggatccgtgggtgtttatgttctccgcaggctatcggttctaaattcttctgtaaactggccaacggacggccagttcattgtctcgtcacacctgtctgccgcaagcctctgtcatcaacagcggatcacacttccgtccactggcgcagcaggttgtgatacatgttgagcagggagaggacctcttctccgtcgccaaagcgggccttcagagactggatggtgcggtccaggtcgtaaagcatcgcacgctgcttatcgtcgcggaccatcgactggatccacaggaaagaggcctggcggacgccgcgggtgaccggggtgacgcagtgcaggctgctggcgggatagagcaccagatgcccggccgggagcttcacccgatgttggccataggtgtcttcaatcaccagttcaccaccctcgtagctctccggatcgcaaaggaacagcgtcgctgacagatcagtgcgcatccagccagcctcgccgttctggcgaacggcgccatcgacgtgaaaaccataggtctcccctggcccatagcggttaaacaacggcgcggaaatcgtccgcggcagcgcggcggaaaaaaactgcggatggccgcgcagcatatcgagcacagcggcctgcaggcgggcatacagcggcgttcgggtatcgatctgctggttctgtttgacggccgccccctggctacccaccgtaacccgcccgtcgacccactcggcctgcgccagttgccgggtaaattccgccacctggtctgtcgatagcacgtcaggaatgtgatacatcatcgcggtgttctctctaaaaagtggggcgcaacggccccacgcgcagactcagaaatggacgttcgccgtcagcataaaggtccggggttcgcccggatgatagcgatagccgctcttgttgatggaggccacgtaatcggtatcaaacaggttatacatattgagctgcagatcgaggttgctgttgacccgatagcccagtttggcgtcggcaacccagtagccctcggtgtgatccggggtaccgaccgcaccatcgctgccccggcgcaggcttccgacatagcgcacaccgccgccgacggacagatcgctggtggcctgatactgcgtccacagcgtaaaggcatgtttcggggtgtaggccagggcggaagatccatcctgtgcaacgttctgtccctccgtcactgtcgcatgctgctgagtgtagccggcgataatcgtccagtccggggtcaggtttccggtcgcggagagttcatacccctccacgcgctttttgccgtactgcgaccaggttccgtcatcgttggcggccacttcgttttcaatatcggtgcggaataatgccgcgctgagcagcagacggttgtcgaagatttgccacttggtgcccagctcgctggattttgccttctgcggcttaaagtcggttcggttagcgctgttgccgctgccgctggcggccagggcgaagctgctgcctcccggcggctgctgtgagatggcgtagttgacgtagacattgccctgctcggttaagcggtacagcgccccggctttccagttaaccagattgccggatttagcggtatcgacagtggtgaccgggctgccggtcgactgtccgggcgggcaggcgatagccccgcgtccgctgccgccgcaggcggtggcgctgtcatatttggtatggtaattgtcgagacgcagcccgccgttgatctcaatccgctcggtcagcgtcagcgtatcaaaggcataaatcccgaaggtatcggtctggccgttggcgttcgccccgtttctgtccaacccgccaatcgacaggttgctcaccggatggtagagattcaccgccggcgcggtcctggcgttaacgccatagttggtctggttttcccgggtaaactccacgccggcgctgacgtcatggcctatcgagccagtatcgaaggtcgaggtgatattggtctggttggtcagaatgcggttgctgacatctttggtattaaccagacgcgaccagctccaggtgttgacgtcattgatatcgggggcggtgatattgttcgcgccgcccatcaccgcggtcaaaagatactcctgtttcactcgcgaccagcgggtggtattgcgcacggtggtattctccgtcagatcgtgttcgaagcgcagggtaccgctgtcggtagtagatttatcgtaatcggagtcggtgccatagaaattgctggtatcgaccttcccggtggagttgagtgcggcatacttcggcgaaggcgccgaatagcccggcaggccgacggtagggatcccgccatccggggtgttgttctgccggacgtgcagatagttcagatacagacgagttggggtatcaaggccgaaggctagcgacggtgcgatgccatagcgttcgttttcaatgcggtcccgaccagcgtcatgggttttttcccccatcaggttcagacggaacgcagcgttgtcgctaaacgcctggttcaggtcgagagtgccccggcgcgaccaggcgctgccgatgctggccgagccgtcgatcccggagtcaaggcgcggctgcttgctgatcatattgatcgagccggagggcgcgctgcggccatagtccgtgccggcgggccctttgatgacttccacctgctgggtattgaaggtatcgcgcgtcacgctgccgatgtcgcgaatgccgtccacatagatgctgttagaggtatccacgccgcgcataaagatggcatccccggtggttgagctgccattctccccggcataaaacgccccgacgccgggaacgtttttgagggcgtcagtcaggttggtgacgccctgatctttaatcacctgttccgggatcacggtgatggtgcgggtggtatcgaccagcggtttattgaacttgggatcggcggaagcgccgggggagtagagtgaaggcggagcggcttccactaccagcgtctcttcactatttttgaccgaattttccgctgcgatgcctgctgccggcgaggctcccagacacagacctgtaaacaatgccaatgagttgaaactgccgaaaggcagagaagcgtttttttccatgataaatgcaggcttactttttgttatgagcacatatcacaccgcgcaaaaggacgttattcgtcgtctggcttgcgctgacccggtgtgattctataaatgataaaaagaatagttatcatttgccttaatatttacatagaaaagttgaccttaaaacaactttcttcacttcgatttacataattcacattttttgaacgataaagcgggaatatagggaaagtgctgcagaataaggtcggtagcaagccgcgccgggcggggttaacttccgggcggccatatgatggttgttccggcacggatcaccagggcacggtacggccctggtaatcgagatactccagtcccggacgttgccgtttgtcgagcaggacgttcaccaggcgtgggatcgtctcttcgatggtcagcggggcatctgccccgccgagctcggtgcggatccatcccggggccatcaccaccagcggatgggaggccgaggaggggcgagcggcgaagctgcgcatgaacatattcagcgcagctttactcccgcgatagagttcccgctggccggtaaggttattggtcagactcccctggccggaggacatcacgccgagcagcccctgcagtttaactgcctgctgcaggcgctcgataacccgcatcggcgccagggcgtttgtgagcatcacctggtaaaactcctcggtggagacgtcgccaatggtctgcgatgggtcacgattggtggtaccggcgttgacaaacagcatatcgaggcttgccgggggaagcgtcgcctgcagcgcggccagctgggcttcatcgcggatgtcgagcgtcgccagcgtagccgcaggggatgcgtcttggccaggtcgtggagcggcgtgtgggatgataaatcgcgcacggtgccgatgacctcccagccgtgctgcaggaacgtcgccgccatagcatggccaaggccgcgcgaggcgccgacgatgaggatagtgttgtgctgatcggatttcatgatgtctctcgctgcagaaaggaggtcttcactataatcaggcccgagatcgggcggaagacgccgccagtgcactcatatcttgcagcaaacgccctgtctggcgactggagcgataatgaacgatcccgattttaatttgctggcggccctcgatccgctgccggtcagtaccgaggtgattacggtttcgcaggcgtggcatccgcgtctggagcaggccccggccaccgctggctgcggcagcgggtgcgtgaggtgtgtcgcgaataaaaaaagcccgcacaagtgcgggcaaaaatactggaagcaatgtgagcaatgtcgtactgaatacccgagtgatttactcaactattcagtgatgagaaagataatatttctcatttaagatatcaaccccatcttttgtgcggaagcgattttttatccgagggtgaaaaccgtgcgcttctggctgtcgtcctgtggccaggccgccgcgatctcctgcagcggccgcggggtggtggcgatggtcaatttccccggcaccgccgcctgcagcatttcgccggtcgccgccagcagctgcgataccgacaggctaccgatcccgctgcccatcagcaggagcggggcggaacgcagcactgcgccatttaacgcgatatcggcgccagccagggaacccacctgcacatagcgcaccggactgccggcaggggtatatttcgccagtgccggcaataataattccgcgctgtgtccccacaggtaatcgatgaccacatcgatctgcgcggcgctgaccgctgaaaattgcccgctcaaggttttatcatcagcggttaactgaatacactcatcggcgtccagcgccgcgagcgactgcgcattgcgcccggttgcaatgatttttttcgcccccagatagcgggcaatctgtaccgccaactgaccggcgctgccggtggcgccattaatcagcaccgtttcgccggcctgaagctgggcgcgtgtcaccagcgatgcccacgcggacataccggggttggccattgccgccgcctggatatcatcgagcgcatccggcagcggcagacaattctgcagggcgaccggcgcccgctgcgccatactgccgaagggggcggtggggaaggcgaagtagacgcgctggccctgaggtgtggtgccgacgccatcgataccaggcacaaagggcagattgccgtcgaagctgtaatggcgtccggatgcccgggccttaaccacatggcttatcgcggcggcgcggacgtcaatgagcgtctggccgggcgcgggctgcgggtcgataaattcggcccaaaccgggccttctgcgagatcaaaaaccacggctgctttcataaattatctcctgtcgggaattatgtgtaaaatacacatattgttttgcagcactatacgcggaaaattaatacatgcaagatgcacataatgactacgacattaccgactttcacggcgcgctgctggatatcatcagcgtaatgaaccagccgctgcgcgatgagcagatcctgcaggcagccggcatccagctggaacagatgctgtttccgctgcttgtggcggtagggcgccatggcccggtgggggtggttgagctggcggatcatttagggcgcgattacaccaccgtcagccgccaggtgaaaaaactggaagcccagggactcgcctgtaagcaaccgaaccgtcatgatcgacggatcagcgaagtgacgcttagcgccagcggacaacagatgatcgacagtattgcggtagcgcggcggcggttaatgaatcaggtgctggcgcagtggccggaagatgaagtgcaggcgctgtttcgcttaacgcgcaaatacgccgacagtttgcagaaatcatcgccgcctggcgcgatgccaggcggctgatggtcaggcggttttggtcgctgccttcaggctctggacgaaggctttcagctcgtcgagcatggtctgcggctcatcgaggtggcgttcgatgattttgacgatggcggaaccggagatagccccggcggctccggcgtcaatggcggcgctcacctgctccggcgcggagataccaaagccctgcagcggcggcgcggcgtgatattccgccagcttctccaccaggtggtgcagcggcagcgcggcgcgattttccgcacccgtcactccggcgcgcgacagcagataggtgtagccgcggccataagaggcaatctggcgcagtaaatcgtcatccgcattgggcgggcagatgaaaatcggcgcgatgttatggcgcatcgccgcctggcggaacggggcggactcttccaccggcacgtcggccaccagcaccgagtcgacgccgacgcgggcgcactgggcatagaacgcatcgatgcccgggctgaagacgaggttggcatacatcagcaggccgattgggatggtcggatgcttctggcggatcgccgccagcatctcaaagcactgcgccggggtcactcccgcggcgaaggcgcgcagggccgcgccctggatggtcgggccgtccgccagcgggtcggagaaagggatccccagttcaagggcatcggcgccgccttcgatcagcgcatcgataattttcagcgactgctccggtcccggatcgccaagggtgacaaaggggacgaaggcgccttcctggcgatttttcagttgggcaaacagcgtctcatagcgttccatcagatttcccctcgcgctttcaggatgtcatgtacggtgaaaatgtctttgtcgccgcggccggagagattaaccaccagcagctgctctttttccgggttctcgcgcatcatcttcagcgcgtgggccagagcgtgagaggactccagcgccgggataatcccttcgtggcgggaaagcgctttaaacgcgtccagcgcttcgtcgtcggtgatcgacacatagtcagcgcgaccggtgctgttcagaaacgcgtgctgcggcccaacggacgggaagtccagcccggcggaaatggagtaagactcttcgatctggccgtcggcggtctgcatcatcggcgacttcataccgaagtagatcccaacgcggccatgcttcagcggcgcgccgtgctcgccgctctcgataccgtgtccggcgggctccacgccgatcaggccgacgttggtttcctcgataaaatcagcgaacatgccgatggcgtttgatccgccgccgacgcaggcgatcaccgcgtccggtaggcggccctctttttcaaggatctgcgctttggtctcttcgccaatcatgcgctggaattcacgcacaatcgtcgggaacgggtgcggaccggcggcggtgcccagcatatagtgcgccttttcgtagctgccggaccagtcgcgcagcgcctcgttacaggcatctttcagcgtggcggagccgctgtgcaccgggatcacctcggcgcccatcaggcgcatacggaacacgttcggcgactggcgctcgacgtccttggcacccatgtagatacggcatttcaggccgagcagggcgctggccagcgctgaggcgacgccgtgctgaccggcgccggtctcggcgataatttcagttttgcccatccgtttggccagcagagcctggcccagcacctggttggttttgtgcgcgccgccgtgcagcagatcttcgcgtttcagatacagggtggtgcgggtgccttcggtcagattccggcatttggtcagggccgtcggacgaccggcgtagtttttcagcaggtcggtgaattccgcctgaaaggccgggtccttctgcgcgctgacaaaggcttcttccagctggcgcagggcgggcatcaggatctgcggcacatacatgccgccgaattcgccgaagtaggggttcagtaaagtgctcattattgctccttaatatgcgcgcagcgtctggaatacggaggccagcttgctggcgtctttaatcccgggttgcgactctacgcctgaattgaaatcgagtccggcacagccgcttttggccgcttccacacagttatcggcgccgaggccgcccgccagcatgacgttgcgcagatcctggccctgcagcaggctccagtcaaagcgctggccgctgccgccctggccgttgtcgagcaggtacttgtcgacatggtggagcgtacgggccgggaaggtttcgccgacgctcagcgctttccagatgcggacgttgtccgcgagggcgtcgcgcagcgcgtcgatataggcctggtcttcatcaccgtgcagctgcacggcggccagccccagagcctgcgcgcgggcgaccacctcctccagcggcgcattgcggaagacgccgacgtactgcagcggcgcagcggcgatcaccgctttggcctgggcgtcattcaccgctcgcggcgaggtcgggacgaagatcagcccaccgtaaatggcgccggactcccaggccacctgggcatcctgcgggcgcgtcaggccgcacactttgttctcgccgagcagcacgcgtttaaccgccgcttccagatccgcctgctccatcagggcggagccgatcaggaagccgttggcgaagtggctcagctcgcgcacttcggcataggtatggatgccggattcgctgatcaccgtgacatccgggccgagacgcgccgccagctgacgggtgcggttaaggtcaatcgacatatcgcgcaggtcgcggttgttaatgcccaccaccttcgccttcaggacgatggcgcgctccagttcctcttcattgctgacttcggtcagcacgcccatattcaggctgtgagccaccgccgagagctgacgatactgttcatcgtcgagcaccgagagcatcagcagacaggcgtcggcctgatagtagcgcgccaggtagatctggtaagggtcgatggtgaagtccttacacaggatcggctgcggcgcgacctggctgacgatcggcaggaaatcgaagctgccctggaaatatttctcatcacacagcaccgagatcgccgaggcgtagtgcttgtagatgctggcgatcgctgccggatcgaaatcctcgcgaatcaaccccttcgacggcgaggccttcttgcactcgagaataaacgcggtgcgggtgccggccagcgcgtcatagaaattgcgctgcgtcgggacgatctcattctgaaaactggctaacggttgttgttgtttgcgggcttccacccaaatcgctttgtcggcaacgatttttgctaaaacggtttgcattatttaccctcttgccgctaaggcggtcactctgtcataggccgcgccgctgtgcagcacatccagtacctgctgagcgttagctttcagatcttcatgcccgtgtaaacgcatcaacatggcgacgttggcggcgacggcggcttcgtgagcggcttcacctttaccttgtagcaagcgcgtcagaatgtcacggttttcttccggggtgccgcccgccagctgcgcctgatggtaaggcgtcaggccgaagtcgtcggcggtcagctgatagcttttaatttccccgttatgcagttcggccaccaccgtaggcgcatgcagtgaaacttcatccatcccaccgctgtgcaccaccgccgcgcgctgataacccagcacgcgcagggtctcggcgatcggcagcaccagttccgggctgtagacgccaatcagcgccagcggcggatgcgccgggttgatcagcggccccagcacgttgaacagggtgcgagtcttcagctgctgacggaccggcatcgcgtggcggaaaccggtgtggtacttcggcgcgaacaggaagcagacgcccagctcatcaagcgcggcgcgggatttatcggcgttcatatcgagattaatgccgaaggccgccagcaggtcagaagagcctgatttactggagacgctgcggttgccgtgtttcgccacttttaacccgcaggccgcagcgacaaaggcgctggcggtggagatattgatgctgttgctgccgtcgccaccggtgccgacgatgtcggcaaacaggtagtccgggcgcgggaacggcgcggcgttttccagcagcgcggtagcggcgccggcaatttcctgcggctgctcgccgcgcactttcatgctgaccagcgcggcggccagttgctcaggcttcacttcgccgcgcacgacggcggagaacagctggtggctctcctgctggctcagggtttccgcctggtacagtttctcaaggatcggctggagggtgttggtatgctccagcttctgcagcgcccaggccagggtctgctccagcagccgcgcgccctgagtggtaaggatcgattccggatggaactggaagccgcacacccggtccgcatcgtgacgcaccgccatcaccataccgttgaaattggcgttaatcgtcagcccggcgggaatattgctgccgaccagcgagtggtagcgcgccaccggcagcgggttagccagaccggcaaacatcgcctggccgtcgtgctcaatgctggaggctttgccatggaggatctcgcccgcctggccgacatagccgccgtaggcttcgacaatggcctggtggccgaggcagatgccgatgatcggcagcttgccgcgcatacgggtcagcagctccggcatgcagccggcttcgcttggcgtacccgggcccggggagagcatcagcaccgggttgtccatggtgcccagacgctcaatcagcgcctgcgccggaacggagttgcgataaatcactacgttatggccgttggcgcgcagctggtctgccaggttataggtaaaagaatcgatattatcgagcagcagaatgtcagccatcagaaaatctccttcgcgtgatgggcctgggcaatggcgcgcagcaccgcgcgggctttatttcgggtctcatccgcttccgactggggaaccgagtcgagcacaatgccggctccggcctggacggtagcgataccttcctgcacgtaggcggaacggatgacgatgcaggtgtcgaggtcgccgtgggcggtgaaatagcccaccgcgccgccgtagctgccgcggcgtttaccttcggcggcggcaatcagctgcatggcgcggaccttcggcgcgccgctgagggtgcccatattcatgcaggcgcgataggcgtggaggacgtcgagatcctgacgcaattcgcctactacacgggagaccagatgcatcacgaaggagtagcggtcaaccttggttaaatcagcgacatagcggctgcccggggtgcagatgcgcgccaggtcattacgcgccaggtccaccagcatcaggtgttcggaaagctctttatgatcggtgcgcatttccagctcgatgcggctgtcgaggtcgcgatccagcgagccgtcggcgcggcggccgcgtggccgggtgccggcgatggggtagatctcaatctgacggctgacggcatcatacttcagcgagctttccggcgaggcgccgaacagggtgaaatcattgtcctgcataaagaacatgtacgggctggggttgctcttcttcagcacatcataagcggccagcggcgatgggcagggcagagagaagcggcgggaaggaaccacctggaagatttccccggcgcggatcgcgcgctgcattttgcgcaccaccgcgccgtactcttcatcgctctggtcaacgtcgcagcgcatttcggccacggtggtaaccggtagcggcgccggcggctcgttcagctgctgacgcagctggctcaggcgctgctccaggcgctgtttttcactctccagcggggtgaacaggctggcctgaatgcgggtatgcttggtctgatggtcgatgaccagcagggtttccgccagatagaagcagtagtccgggcaggcggtgtcgctttgcaactggggaagatcttcaaaaccggccaccaggtcataggcgaacaggccgccgaagaacatcgcttcgcgctcgttgtccggaacgctcaccagctcctgcaggagacggaaggcgtcaaacaccgacagtgagcagagacgggcgtcttcatcgagcagggcgctgacggccgggaaggtcaggatgcggccgttgggctggcgctgattgttgatcccggagggcagcgcgccgtccagtagttccagcagcgccgcgccgttggcggagagggcctgaatagtgacagtgtcaccaagggccgtaatgcgcagcgcgctatcgaccagcagcaggctttttaagtcatctttgctgtcgatgtcagcggattccagcagcagcgtcgccggacgggcgccgcacagttggtggaataacgccgtcgggttctcccggtagatggcgtcgctggtgagaagctcgagtgccggtttggatgtttgcattattgttctcgcctgttcgtattatttttgtccaataaaaagcccgctcattggcgggccgggtatctgtatgctgaatgcaaaacgcgatcacgccgcccgtcgtcaggaggtgcgccaccagctgtgcagagtgataaagtgcattttcatcgtgataccccttcatgtgaacttgcgtactagttaactagttcgatggaataaagtcaacccttgtttgcagattttctctgcctgtcggtatgataatgcgcttatttacgttgatgtccagcaggagtccttttgagcgacagccaatacgcagtgatttacgatctgcacagccataccaccgcctctgacgggcggctgactccgcaggaactggtccatcgcgcccatgagatgcgcgtcggcaccctggcgatcaccgaccatgacagcgtggcggcgatcccggcggcccgggaggagatcgcccgcgccggattacccttgaccctggtgaacggcgtcgagatttccaccctttgggagaatcacgagattcatattgtgggtctgaatattgatattgcgcacccaacgatgaccgccctgctggaggagcagaaagcgcggcgccagcagcgcggtcagatgattgccgagcgcctggagaaggcgcggatccccggcgcctgggaaggggcgctgcgactggcggacggtggcgccgtcacccgcggccattttgcccgttttctggtggaggccggccatgcgaaaaacatggcggaagtcttcaaaaaataccttgcccgcgggaaaaccggttacgtgccgccgcagtggtgtacaataaaacaagcgattgatgtgattcatcattctggcggcaaggcggtgattgcccatcccgggcgctacgatctctccgccaagtggttgaagcggctgttggcccactttagcgagcagggcggtgatgccatggaagtggcccagtgtcagcaggcgccccatgaacgcgcccagctggccaccctggccgtgcagtttggtcttctggcgtcgcagggatccgattttcatcagccctgcgcgtggatcgaacttggccgtaagctctggcttcctgccggcgtggaaggcgtctggcacagttgggaagcggccgccgaataaaaattgagagggaagtatgagccagtttttttatatccatccggataacccgcaggcgcggttgattaaccaggcggtggagattgtgcgtaagggcggggtgatcgtttatcctaccgactccggctacgcgctgggctgcaaaattgaagacaagggggcgatggagcggatctgccgcattcgtcagctgccggacggccacaactttaccctgatgtgccgcgatctgtccgagctgtcaacctacgcttttgtggataatgtggcgtttcgcctgatgaaaaacaacacgccgggcaactatacctttatccttaaggggaccaaagaggtgccgcgtcggctgctgcaggagaagcgtaaaaccatcggcatgcgcgtcccgtctaaccccatcgctcaggcgttgctcgagaccttaggcgagccgatgctctccacgtcgctgatgctgcccggcagcgactttaccgaatccgacccggaagagatcaaagatcgtctggagaaagtggtggacctcatcattcacggcggtttccttgggcagcagccgaccacggttatcgatctcactgaagacaccccggtggtgctgcgcgaaggcgtcggcgacgtgaggccgtttctctaaggctatctgccgggcggtgcatcatgcgccgtccggtaccccgcgttttcgccccgacggcacgataatcatccatagcgctacacaaaccagcagcgcgccgagaatcaatcctttctccaccgtctctccgaggcagagatagccccacagcgccgcaaaaggtgggatcaaaaaggtcaccgacagcgaacgcagcggccctatatctgcaatcaagcggaagtagataatataccctgccgccgtgcagaccacgcccagcatgactatcgctatccacggcagactctgccgccagtctacggcaggcccatgccagcaggaccagagaaagaaaggaaacagaaacagcgtggcgccgacctggctacccagcgcgacgcgttcagcctcgaggccgcctcgctgctggatccagcggcgggtcagaaagccggccagaccgtaacaggcggtcgcggtcaggcaggcgccaatccccggcagcagcagggcggcgctaaggccagacgtcgggcgcgcgatcaccgccacgccaatggcgcccagtatcgcgccgccgcctttgcgcagggttaacggttctgcaaagcataacgcgccgatcagcacccccatcatcggcgccgtggcgttaagcgtggcggagtaccctgccggcagccattgcgcggcaaggcagtacatgagaaaaggaaggcctgaattaatgacccccagctgcagagtggatgtgaattttccctgatacccgctccatttaccctgcacgccgagtaacagcccgagcgcgatagcggcgaacagtacgcgaagaaaagcgctgttcaacgccccgaaggccggggtggtgatgcgcataaacaaaaagctggcgccccagagggcggcgagcagcagcaggcggccatagtcgataacacgcatgattgactccttgtagtcacgaaggaagtcaactgtagaacccacgtgcagcgtgcgacaaacgcgttatgcttacatgattaagtttttcttaaccgaggttccatacccatgaaactcccgccgctgaatgcgttgcgctgctttgaggcggcggcgcggctgctcagcctgaagctggccgccagtgagctttgcgtcacgcccagcgccgtcagccagcagattgcccgccttgaggagacgctgaatgtcccgctatttatccgtactccgcgacggttacagttaacggcggtgggagagatctacctgcgggccattcagccggcgtttcatcagatagccgccgccacccagcgtctgcaggtgcccccgggaccagaaaaggtagctatcagctgtaccagcggcttcgccattcagtggctgctgccgcggctggctgattttgaacaacgctatccgcagatagagatccagatcggcaccaccaaccggcgagtggatttgctgagtgaagggatcgattttgccgtgcgtcatggtgtcggcggctggccggaactgcaggcttaccgcctgctggatgacgacctgatgccggtctgtagcccgcaactgattgctccgcgccggacgctcaccgatgcgagcgatctactgcagtatccgctgctgcacgatgaacatcgtgaagactgggcgctgtggtgtgaggccgtggggctggcgccgcacttcgcgcggcgtgggccggtgttcactgattccaacggcgtgacggaggcggcgttcgccggtatggggatggcattgctgcgacgctcattcatagcgcctgcgctgacgcaggggcggctggttaatcctctggcgcagcacatcgcctgtccgctggcctatcatctggtttaccacgagaccgcgctgctggcgcctgccaaccgctgttttcgcgactggctgcttggccagcgcccggccgttgctgaggagcacgcgtagtgaggggggcgctgtccgataaagatccgtatgcgtgaatgggcacaggagaatgaggaaaatctgttccatactaaagacggggcgcggcgaacagaagctttcccgacgaagtttttctttttacagcgtacaggtcgcggagaagcgctttttgttgataaatgagagcaccgtaacagctataccgcagatgaggcttaatcttcctaacccgcagatgatcagttctgctgaattaatcatttatcgacccaaagacagataccaccaattagtagggcaataaaacctaccaatgaacacaacaattcggcgataaaccagtatttgatgtttgcaggtagctcccgtatataatcgacatcatcattttttctctgaatagactttttgccaaagatcaatatgagggatcgctatgcgctaattgcatacgtttcccttatcctcagtttcttatgtaattgatgatactgattgggagtgaataaaatagccaagttttgctcttggctatttatttcaattaaatgaatgatggtaaatagaaaactgataacatcatgaatagaaaaataataccgaccacggaaaatcgtacttttacacgtaaccaatcggtatactgattaggaagttctttaatgaatcgaatttgttcattatccattcctcgcgtatgaaatgagttttctttaaagtataatgctttaataaaaaatgcatcacgcataaacgagaaaaagaaccccccatcctgataaattaaagcctctactggtcttgcgccaaatttttcaacaaatagcgaacagagagtaatgaatttatttttcgaaatgcgatcgtaaataattgaaataacccccgtaagtattaggcatagacacaataccaatccaatcgagttacgatgcataattataaaattaattaccgaaagtttcatacagctgctctccaccccattcaccgaatgcgccacctgcactactaccgacatagcctaaaccagccccagcaatcacagagcaagcaagccctccgacaccagcagtaccaacaccgatagcgatacaaagaggtattgctaaatagccaccagcaacaccaacccccgtacctacagcaaagctaccaatctcagtatactttttcttggtacattcagcttcgcgaccaacagaacaagcctcatttatttcatttagtgaatgcagtccgctaaaaccaatgcctaaataaccagtgtaacgcattgcttttacgtatttagctgcccgttcgatgtgggtagcatagccttcaatgtcactgatccccgtttcattccatttgtgggtaatagaactgctggataggccaagtgctttttttatttttgtatactctccgaatttcatagccttattcaggaatctgactttaagtattgattcaagctctttaaacaactggctacgttgaacgtaaaattgttctcctagcaacgagcctctcgttatgtaggtattcttatacgtttcttgaatctctctgagtattttttcgatactctcaaagtattttccaacaggatcagcagcaaggccaattcctgtatcagcgtagctggtgaaattagctatggttgcgtagtgtttgtgcagcaagttagcttcctggattgtcagcggttctaacgccgcatcaactcgcgctttcgcggctttcatgtgggcaatctgctcgtcgtcctgtttctctggatcaaccagaagcataatcgaaccagctttgtatctttcatccgggccgttcagaatagagaatagctcttttgcccctgctggtgggttttcagtgaataacaggcgttgccacgcttccgtagtaccgccataagtgataacggcaaaacctgcatctatacctgttttcttttttgctgtttgggcgttctgttccggttctgactcaatcggccctggaagttcaggcatcttgacgaggtgaggtagatcagtgtgcgttaccgttgcttctccaccaagttcgtaatcatcatcccagtttgaattgatgaatttggatttacaggggcaggagctataactgtgtagtgttccggcaatccttttgccgtgtatgtcatcatcaagcccaccacaaatacggtaaagccctggatgtttaccacaagttactttatgcccttcacaggacatatctctgtcaaaatgctggtggtcgctccatccttcagtgataacgccaccacatcgtgtcttatcacctctgaataaatagtatcccttaacgcccatcagtgcttactccctgacacggtcaagaatccttccgggagttcgcggccttcacgaaaaaccagtttgctgcacgattgtggggtagagattatttcatcaccattatcaagcatactgccaacgagtgcagcggatgcgccctgcatgattcgggccttgccagcaccggaaataatagtggactcgctgccatcagcatatacaaccttgtcacctacccgagcaacttgtaatcctccggtagtcgcaccgcctgaagcatggcgaatgactccaccgcgacgggtcagacttccaacgactgcaaaccggaaaatgtgagctaacgggcggcttagatgctgttttttaatttcctcaagttctttccgggttttgtcatcgcagagtgacaaaagctcttcgtcgtaaggcggttgtgattgggcctcattaatttcgggtgtgatttcgttggtatattgctgcataagtccctctgcttgttgtgaattaatcttcatacgtaattcattgtacaaataacacccatgtgccggaagttgtttttcataaaaatgaaactgcgttttaaaatatttattttgtgaatgttatggcgcgattcatttactatcgactatgtcgaagcttttgctgtacgggcaatgctgcgactccgtgacgaaggttaatgtgtagatactgttggaatagacacacagcgttttcccgttcgctgtgcttgactgttccggattgctcatcgttatacgtctaagttcagaaagactcaggcgcacaaaacttgttgaatcatttagtctaaaattcgtgtagtatgtgcgcccacgaatcattgtgtgacagcttgtgtggtacgttgtttgccatgctgtgtgccatgaaatatttacagatcagtgagttaagttgagttttaggctaactcgttgtttttgaaagcataccagacgcctgggaaggcgacaccttaaggaagctcaatgagcgagaaactgcaaaaagtgctggcccgcgccggccacggctcccgccgtgaaattgaagcgaaaatcgaagctggccgcgtcagcgtcgacggcaaaatcgccaccctcggcgatcgtgtggaaattgtccctggtttaaaaattcgtatcgatggtcatctgatctcggtgaaagagtctgccgagcagatctgccgcgtgctggcttactataagccggaaggcgagctgtgcacccgtaacgatccggaaggacgcccgacggtatttgatcgtctgcctaaactgcgcggcgcgcgctggattgccgttggtcgtctggacgtgaatacctgcggcctgctgctgttcaccaccgatggcgaactggccaaccgcctgatgcacccgagccgtgaagtcgagcgtgagtacgccgttcgcgttttcggccaggtggatgatgataagctgcgccagctgtcgcgcggcgtacagttagaagatggtccggcagcgtttaaaaccatcaaattcaccggcggcgaagggattaaccagtggtataacgttaccctgaccgaagggcgtaaccgcgaagtgcgtcgcctgtgggaagcggtcggcgtgcaggtcagccgtctgatccgcgtgcgctacggcgatattctgctgccgaaaggcctgccgcgcggcggctataccgagctggacctggcgcagaccaactacctgcgcgagctggtggagctcacgccggaaaccagctctaaggttgccgtcgagaaagaccgtcggcggttgaaagccaatcagatccgtcgggcggtgaagcgtcacagccagaccagcgctaatccgcgccagggtaacaacagcaaccgtcgttccagtactcgcaataagactaacggttaatgttatgcgttccggtgacttgccgccggaacgcttacttccttccgcgctatcaggccctcagtagtctatccccatctgcgctttaatcccggcatcaaatgcatgcttgaccggacgcagttcgctgacggtatcggccagttcaataatatcgcgatgacagccgcggccggtgatgatcaccgactgatgggcagggcgctcacgcagggcgctcagcaccgactccagcggcaggtaatcatacgccaccatgtaggtcagctcgtccagcagcaccagatcgagctggtcgtcagcgagcatacggcgggcatgctcccagaccgccaggcaggcggcggtgtcgctgtcgcgatcctgggtgttccaggtgaagccggtggccatcacctgaaattcgacgccgtgaggctccagcagattacgctcgccgttaggccaggtccccttgataaactggatcacgccgacttttttgccatggccgacggcgcgggtcgcggtgccaaaggcggcggtggttttgcctttgccgttgccggtaaagaccatcacaatgccgcgctcgtcctgggccgccgccacccgggcgtcaactttatctttcagccgctgctggcgttcgcggtagcgttcatcactcattgggcaattcctggtttacgtcccggttgggcgtcgaaggtcattcccgtcttgcgacgactgtcgtcacccatcagccacagatagacgggcataatgtcagcgggggttttcagtttcagcggatcttccgtcgggaacgcgctggcgcgcattccggtgcgagtgccgccggggttgatacagtttacccgcaggtggcggctttgatactcgtcggccagcacctgcatcatcccttcggtggcgaatttggaaacggcataggcgccccagttggcgcggccctgacgaccgacgctggatgaggtgaagaccagcgagcccgattccgaacggagtaataaaggaagaagcgcctgggtcagcataaaggtgccattaacgttcacctgcatcacctgctgccagacctccggcttctgctcttccattgggcagatgtcgccgagcaggccagcgttatgcagcacgccgtcaaggcggggatagtgcatgctgatctgctgcgccagctgctggcacgcctggggcgtacaggtgagcaggtcgagggtaaaccagcgagggggaataccaccctcacgctcaatctcctgggcgacggtgcgcagtttgtcgtcgttgcgacccagcaggataacgctggcgctatagcgcgcgtaggtcagggccgcttcacgaccaatcccgtcgctggccccggtgaccaggatgatgcgatctttcagcaagtgacgttgtggttgataatgcacggcaactccttgggcgatcggttcccgatcgcgcttcatctttggtatctcacttttgcgctgttatgcctgaaagcgcccgccattgcaatcggcgaagcggaaagtattcacaaaattaatatcttgcaacgatttcagccgcgcgaaaaaaaacagaatccgctgcgcagagaacacaaagcacaaagacttctcgccagcggctgaggtacactgtgcagcaacgtcagtgctttacacaaggtgaaaacgtggaattacttgctcagtacggcttatttttagccaagatcgcgacggttgtcgtcgccatcgcggtgattgccgctattatcgtcaacctcgctcagcgcaagaagcagcgcggcgagctgcgggtgaccaatcttagcgagcattataaagagatgaaggaatcgctggcggtggcgctgctggacggcccgcagcagaagcagtggcataaggcgcagaagaaaaagcaaaaacaagaggcgaaggcggccaaagcgcgggcgaagctgggcaatgccgagccggaaggcaagccgcgcgcctgggtgctggatttcaaaggcagtatggatgctcatgaggtcaatagcctgcgggaagagatcaccgcggtactggcggcggcgaaagcgcgcgatcaggtggtgattcgcctggaaagccccggcggggtggtgcacggctacggtctggccgcctctcagctgcagcgtttgcgcgacaagcagatcccgctgacggtgtcggtcgacaaagtggcggccagcggcggctatatgatggcctgcgtggcgaacaaaattgtctcggcgccgtttgcgatcctcggatctattggtgtggtggcgcagatcccgaacctgcaccgcttcctgaagaataaagatatcgatatcgaactgcacactgccgggcagtacaaacgaacgctcaccatgctgggcgaaaataccgaggaagggcggcgcaagttccgcgaggatctcaatgagacacatcatttgttcaaggatttcgtccaccggatgcgtccgggacttgatattgagcaggtggccaccggcgaacactggtacggggtgcaggcgctggaaaaaggtctggtggatgcggttgaaaccagcgatgagctgctgctggggctgatggagagccacgaggtgatcggggtgcgttatcaacagcgtaagaagatgctcgaccgctttaccggtagcgcgtcggagagcgccgatcggcttctgctgcgctggtggcagcgcggtcagaaaccgctgatgtaaataacataacgcgaggcctgggcctcgcgttattgttttcactggtcttaatcgaccaggtggtacttgtccgacagctcgtgagcaagatacttaaacatgttaaataccgctgtactcttcggcgtcggtagtccctgctcatcaaggtaaaactcaccgctaaacaccaggacattgttgcgctgaacgacgtcggtggcttcgataccggctaacgtatcctcatgttcgcgaataagtttgttggctttttcgagcagcgtctggcgatcgattggttgggttgtaccttgcataacggactcctctttttctccgcgcgtagtttacgccgcgcggcggcgtggggcaaattttccatgcataaatcaggggtaatggtaaccagtggagaaacagccgtttactggcgggatttgcttttgcatgctaataaagttgcgtaacgaattttatcaggtacagtgtgacgctttcggcgatctggcaacagatttgcttgacattcggccaaaaattcttcgtgctatgtcacctgacgagaaaaagtcagcaaactcaagcgcctggttttacggagatgaaacgggtgttcagggttgatattcaccgacggtgccgcaacatatgaggcagtcgccagtggagggtgtatgaatgtgcgatgtattcctggatgaatcaaattaggtaaaggtgaatatgggtaaagctctcgttatcgttgagtccccggcaaaagccaaaacgatcaataagtatctgggtaatgactacgtggtgaaatccagcgtcggtcatatccgcgatttgccgaccagtggatcagcttccaaaaagagcgccgactctaccgccaccaaaggggctaaaaagcctaaaaaggacgaacgtagtgctctggttaaccgtatgggcgtggacccatggcatgactggaatgcgcactatgaagtacttccgggtaaagaaaaggtagtttcagaactcaaacagttggcggaaaaagctgaccacatctatctcgcaaccgaccttgaccgcgaaggggaagccattgcctggcacctgcgggaagtcatcggcggcgatgaacagcgttacagccgcgtggtgttcaatgagatcaccaaaaacgctattcgtcaggcctttgaaaagccgggcgaactgaatatcgatcgggttaacgcccagcaggcgcgtcgttttatggaccgcgtggtgggctatatggtttcgccgctgctgtggaaaaaaatcgcccgtggtctttctgccgggcgcgtgcagtccgtcgcggtccgcctggtggtggagcgtgaacgtgaaattaaagcgttcgtcccggaagagtactgggaagtcgacgccagcaccaccacgccgggcggtgacgccctgccgctgcaggtgacccataaggacgataagccgttccgtccggtcagccgcgatgagaccatggcggcggtatcgctgctggaaaaagccagctacagcgtactggagcgtgaagataagccgaccagcagcaagccgggcgcgccgttcatcacctccaccctgcagcaggcggccagcacccgtctgggcttcggcgtgaaaaagaccatgatgatggctcagcgactctatgaggcagggcacatcacctatatgcgtaccgactccaccaacctgagtcaggacgcgctgaacatggttcgcggctacatcagcgacaagtttggcaaaaaatatctgccggatagcgcgaaccagtacgccagcaaagaaaactcgcaggaagcgcacgaagcgattcgtccgtctgatgtgaacgtgctggcggaaacgctgaaagatatggaagcggatgcgcagaagctttatcagctgatctggcgccagtttgtcgcctgtcagatgacgccggcgcagtacgactccaccacgctgaccgtggctgcgggtgatttcaaactgaaagcgcgcggtcgcactttacgtttcgacggctggacaaaagtcatgccggcgctgcgcaagggcgatgaagaccggacgctgccgctggtcaaacagggcgaccgcctgagcctggtggagctgacgcctgcgcagcactttaccaagccgccggcgcgtttcagcgaggcctcgctggtgaaagagctggaaaaacgcgggattggccgtccgtcgacctacgcgtcgatcatttcgaccattcaggatcgcggctacgtgcgggtggaaaatcgtcgtttttacgccgaaaaaatgggcgagatcgttaccgaccggctggaagaaaacttccgcgatctgatgaactacgattttaccgcgcagatggaggatcgcctcgaccaggttgcgaaccaccaggccgagtggaaagaggtgctgaaccacttcttcggcgattttaccacccagctggcgacggcagagaaagatccggaagagggcggcatgcagccgaacccgatggtgctcaccagcatcgactgcccgacctgcggccgtaaaatggggatccgtaccgccagcaccggcgttttcctcggctgttcgggctatgccttgccgccgaaagagcggtgcaaaaccaccatcaacctggtgccggagaacgaagtcctcaacgtgctggaaggcgatgacgcggaaaccaacgcgctgcgcgccaaacgtcgctgccagaagtgtgggacggcgatggacagctaccttatcgatcctaagcgtaagctgcatgtctgtggtaataacccgacctgcgacggctacgagattgaagagggcgaattccgcatcaagggctatgatggcccggtggtggagtgcgagaagtgcgggtctgaaatgcacctaaaaatggggcgtttcggtaaatacatggcctgtaccaacgacgagtgtaagaacacgcgtaagatcctgcgcaatggcgaagtggctccgccgaaggaagatccggtgccgctgccggagctgccgtgtgagaagtctgacgcctactttgtgctgcgcgacggggcggcgggcgtcttcctggcggccaacaccttcccgaaatcacgggaaacgcgtgcgccgctggtggaggagctgtaccgcttccgcgatcgtctgccggaaaaactgcgttatctcgccgatgcgccgcagcaggatccggaaggcaataaaacgctggtacgctttagccgtaaaaccaagcagcagtacgtggcgtctgaaaaagagggcaaagcgaccggctggtcagctttctttatcgacggtaagtggacggaagccaaaaagtaatggcgttcgttcgggcaggaaaagcgcgcttttcctgctcaggcgaccggcagagagagtgcatttctctgccgtgtcgtcttcccctctttgcgttaatttcctccccttataaccacctatattatttttcgttagcgtctatacagtgttgatataaatgatatagtggttatagttaatgccttttttattattaaaacgtcttatacatcatcgctttcaggatgcattgcggcgccactatggccaactgccgggagcccagggccttcatcggcgacaagttgcctgaacgtaaagtgtattaagcggcttcattttacgcgcaaacggatatcagccatgaaactacaacagcttcgctacatcgttgaggtggttaaccataacctgaatgtttcatccaccgccgaagggctctatacctcccagccgggtatcagtaagcaggtccgcatgctggaggatgagctgggcattcagatctttgcccgcagcggtaaacacttaacccaggtgacgccggccgggcaggagatcatccgcatcgcccgcgaagtgctgtcgaaagtcgatgccatcaaatctgtcgccggagagcatacctggcctgacaaagggtctctttacgtcgccaccacccatacccaggcgcgctatgcgttaccgggagtgatcaaggggtttattgaacgctacccgcgggtgtcgctgcatatgcatcagggctcgccgactcagattgcggaggctgtgtcgaaaggcaatgccgatttcgccatcgccaccgaggcgctacatctgtatgacgatctggtgatgctgccatgctatcactggaaccggtcgattgtagtgacccccgagcatcctctggccaccaagggctcggtgtccatagaggaactggcccagtatccattggtaacctatacctttggttttaccggccgctccgaactggataccgcgtttaaccgtgcgggcctgacgccgcgcattgtttttaccgccaccgatgccgacgtcatcaaaacctatgttcgcctggggctgggggtaggggtaatcgccagcatggcggtggatccggtctctgacccggatctggtgaagctggatgcgaacggtattttcagccacagcaccactaagataggtttccgccgtagcaccttcttacgaagctacatgtatgattttattcaacgttttgctccccatttgaccagggacgtggtagataccgcggtggctttacgctcgaatgaagatattgaagcgatgttcaaagatataaaacttccggaaaaataaccctgaaaataataatggcactccctgcgaggagtgccattaactatgatggactgtatttaacaacttaaacctcgaaccaatcacaaaattaataatttttggcaacacgtttttcattatgcccgccgcgatcaaataaccgattaaatatattccatcaggcctaaattcactggattaatcttttatccataattaagatttatctgtacctgatgatttgagcaattggtggtgacaatatgataagtaatatcgattacatgaaactggcgatgtcatacgagaatgacaaaaccgaaatcgatcccgttctgcgtagtcgcgtatggggcgtagtgttggtagggttggcgatgttctggagcatcatcgcgctcaccatctgcaacatctggattgtcagctaaagctgtaggtcatcgttgtagatacatgtcatttttatgacagtgaaaggaaactgtaatataaaatcagtgaccggcaatacagggagaatatattttgccgctggattcatccaacctgaaatcactcaccagagctaatcactgcccgctggccgattagctctttttttgtcctcgtgtactaatacaatatcggcatacgccctctttgcactattttggtgctatttcgcctgctctcggataattcccgtttcctctctctctgtctcgtcgtatttagcaatttgggttgttatcaaagtgttatgctcagtatgtgttatctttaatggagaccctgaggagaatcagggtatgccatccctgagataaaggaggagctatgtcgtcaaccctacgagaagccagtaaggacacgctgcaggtcaacgataaaacctggcattactacagtctgccgttggcggagaagcagctgggcgagatcagtcgactgcccaagtcgctgaaggtgctgatggagaacctgctgcgctggcaggacggtgactcggtaactgaagaagatattcgcgccctggccggctggctgcaacaggcccatgccgaccgggaaatcgcctaccgtccggcacgcgtcctgatgcaggactttaccggcgtgccggcggtagtggatctggccgccatgcgcgaggcggtgaaacgccttggcggcgatacggcgaaggttaatccgctatcgccggttgacctggtgatcgaccactcggtgaccgttgaccgcttcggcgacgacgaggccttcgaagacaacgtccgcctggaaatggagcggaaccacgaacgctacgcttttctgcgctgggggcagcaggccttcagccgcttcagcgtggtgccgccgggcaccggtatttgccaccaggtgaacctggaataccttggccgggcggtctggagcgaggaggtgaacggccagtggatggcgtggccggatacgctggtgggcaccgactcccataccaccatgattaatggtcttggcgtgctgggctggggcgtgggcgggattgaagcggaagccgctatgctgggccagccggtgtcaatgctgatccccgatgttgtgggctttaagctcagcggcaaactgcgcgaaggcatcaccgccactgacctggtactgacggttacccaaatgctgcgtcagcatggcgtcgtcggcaagtttgttgaattctacggtgacggcctggataccttaccccttgccgacagggcgaccatcgccaatatggcgccggagtatggcgccacctgtggctttttccctatcgatgacgtaacgctcagctacatgcgtctcagcggccgtagcgaagaacaggtcgcgctggtggaagcctacgctaaagcccagggcatgtggcgccagcctggcgatgagccggtctttaccagtaccctggcgctggatatgagcagcgtcgaagcgagcctcgccgggccgaagcgaccgcaggatcgcgtggcgctgggcgatgttccgaaagccttcgccgccagcggcgagctggaggttaaccaccttcagcgtcagcgtcagccggttgactatacgctgaacgggcatcactattcgctaccggatggcgcggtggctattgcagcgattacctcctgcaccaatacctctaaccccagcgtgttgatggccgccggcctgctggcgaaaaaagccgtcgaacgcggcctgcagccgcagccgtgggtgaaagcttccctggccccaggctcgaaagtggtgtcggattatctggcccatgccggcctgacgccttacctcgaccagctcggcttcaatctggtgggatatggttgcaccacctgtatcggtaactccggtccattgcctgaacctatcgaagaagcgatcaaaaaaggcgatctgaccgtcggggcagtgctctccggtaaccgtaacttcgaagggcgtattcatccgctggtgaaaaccaactggctggcctcgccgccgttggtggtcgcctatgcgctggcggggaacatgaatatcgacctcacccgcgagccgttgggacagggcaagaatggcgagccggtctatctgaaagatatctggccgagcggggaggagattgcccgcgcggtggaacaggtctccaccgagatgttccgcaaagagtacgcagaagtgttttccggcactgaggagtggaaggcgatcaaggtggaggcgtcagatacctacgactggcaggaggactcgacctatattcgcttgtcgccgttctttgacgagatgggcgccgagccgctgccggtagaggatattcgcggcgcgcggatcctcgccatgctgggcgactcagtcaccacggaccacatttcgccggcggggagcatcaaagccgatagtccggcaggccgctatctgcaggagcatggggttgcccggcgcgactttaactcctatggttcccgtcgcggtaaccatgaggtgatgatgcgtggcaccttcgccaatatccgcatccgtaacgaaatggtcccaggggtggaagggggtatgacccgccatctgccggatcctgaaccgatggcgatttacgatgcggcgatgctgtacaaggctgagggtacaccgctggcggtgattgccggtaaggagtatggctcaggttccagccgtgactgggcggcgaaggggccgcgcctgctggggattcgggtagtgatcgccgagtccttcgagcgtatccatcgttccaacctgatcggaatgggcattttgccgctggagttcccgcagggcgtcacccgcaaaacgctacggttgacaggggaagagcggattgatatcagtgatctgcagtcgcttcagcctggcgctacggtgccggtgaccctgactcgcgctgacggctcgcaggaagcgatcccttgtcggtgccgtatcgacacggcgacagaactcacctactaccgcaacgacggcatcctgcactacgttattcgtaatatgctgtgaaacaaagggccagcatcgctggccctttttcggttattccaccggtttattccgtcggcttgctgttcagcagatggcccatcttggcggctttggtgtccagatagtgagcgtttttcgggttacgcccgacgatcagcggcacccgctccacaatgttgatcccggcttcggtaagaatttccacttttttcgggttattggttaataaccgcacctgctcaacgttgagcaatttgaacatgtcggcgcacaaggtgaaatcgcgctcatcggcggcgaagccaagctgatggttcgcttcgacagtgtcgtagccctgatcctgcagcgcgtaggcgcggatcttattcaataaaccaatgttgcgtccttcctggcggtgatagagcaggatcccccgaccttcttcagcgatatgcgacagggccgcttccagttgaaagccgcaatcacagcgcaggctaaacagggcatcgcccgtcaaacactctgaatgtacgcgggcgaggaccggcgactgccctgatatatcgccatacaccagcgcgacatgatcctgtccggttgccagttcttcaaaacccaccatcaggaaatcgccccagggggttggcagtttggcttctgccacacgtttaagctgcatgtgattctccagattctgtcagcacctgactgtgctttctgtttcccgctattttgccacaacgcctggacgttctcctaatcgcgaacggttagccgtgtggaaagcgcacaaacgatctactttccgctatgatgttcatctacaaggagaaggagagaaaatgctgttgatagcccgacgaactgctctcgcggcggcgctgctgctggttatgcccctcacggtctggctttccgggtggctgtggcagcctggactgccggttgccatgttgaaaagcctgtggtgggtgacggaaacggtgacccagccgtggggaattatcactcatgtcgtgctttgcggctggttcctctggtgtctgcgctttcgcctgcgcgcggcgttgatcctgttccttatccttgccgccgctatcctggcgggacagggggcgaaatcctgggtcaaggcgcgggtccaggagccgagaccgttcgtcatctggctggaaaacacaaggcaggtgccggtgacgcaattctacgcgttaaagcgtaaagaacgcgctaaactggtgcatgaacagctggcgcaggcgcaggacattccgtcatttttacgcaaacactggcagaaggagacggggtttgctttcccgtcaggtcacaccatgtttgccgccagctgggcgttactcgctgcggggctgctgtggccgcgtcgccgctggggcacaatcgcggtgctgctggtgtgggcgacggcggtgatgggcagtcgcctggcgctgggcatgcactggccgctggatctcatcgtcgccacgctgatctcctggctgctggtcacggtggcctgctggctgacgcagcgcctttgtggtccgctctcgccgcccggagaagaggcgcaggatattaaaaaacggatgcctgaagcggaataatgttgattttagcggcatccgaccgcatatcctgaagagttgccatgctttttcattccaccgctgcggcgaaaatgatactttatagggctgaaagcgggcttttttcgcgcaacccacataacgggaagtcatgtgaaatatttactcattttcttactggtgttagcaatcttcgtcatttcagtgacgctgggggcgcagaatgaccaacaggtcactttcaactatttactcgctcagggtgaattccgcatatcgacgctgctggcggtgctgtttgccgcgggctttgccattggctggctgatctgcggcctgttctggctgcgggtgcgtgtctcactggcgcgcgcggagcggaaaattaagcgtcttgagcatcagattgcccccgtcagcccggcggctgtcgacgcaggcgtgcctgcggtgaaggaataacctcttatgctggagttgttgtttctgcttttacccgttgccgccgcttacggctggtacatggggcgcagaagtgcacaacagtccaaacaggacgatgcgagccgcctgtcgcgagattacgtggcgggggttaacttcctgctcagcaaccagcaggataaagccgtcgacctgttccttgatatgctgaaagaggataccggtaccgttgaggcgcacctgacgctcggtaatttgttccgttcgcgcggcgaagtcgaccgcgcgatccgaattcaccagagcctgatggaaagcgcgtcgttaacctacgatcagcgcctgttagcggtgcagcagctgggacgggattatatggccgccggactgtatgaccgcgcggaagacatgttcaaacagctggtggatgagaccgatttccgcctcggcgcgctgcagcaactgctgcagatttaccaggcgaccagcgactggcagtcggctattgaagtggctgaacggctggtgaagctagggaaagagaaacatcgtggcgaaatcgccaacttctggtgcgaactggccctgcagcagatggcagccaacgatctggataaagcgatggcgttgttgagaaaaggcgccgccgcggaccgcaacagcgcccgggtatcgatcatgatgggccgggtgtggatggaaaagggcgactacgccaaagcggtggagagcctcgagcgggttatcgatcaggataaagagctggtgggtgaaacgctggagatgctacagacctgctaccagcagctcggcaaaaccgatgaatgggaagtttttctgcgccgctgcgtggaggagaacgccggggcgaccgccgaactgatgctggcgcagatccttgagcagcgggaaggcgtcgaagcggcgcaaaactacgtcacccggcagctggaacgccacccgaccatgcgcgtcttccataagctgatggactaccatctcaacgaagcggaagaagggcgggcgaaagaaagccttggggtgctgcgaaacatggttggtgagcaggtgcgcagcaaaccacgctatcgctgccagaaatgcgggtttaccgctcatacactctactggcattgtccgtcctgccgctcgtgggcgaccattaaacccattcgcggtctcgacggccagtaaagccaaaaaaaagccctccattagttacaacatacttatcgcttcactcctctccaggcgcggccccggcagcgccatcgtccggtcagggcaggtacggcagtctgttattttgttcgcttcacaggtagaatgctgcccgtttaccttttttgcgccaccccggcgcccatcaacactaaggtctggtcatgacgtctacagctatcccatcttcccgtgctgtcacatcctctcccgttgtggttgcgctcgactatgataatcgcgataaagcgctggcatttgtcgaccgcatcgacccgcgcgactgccgcctgaaggtgggcaaagagatgttcaccctgctgggcccgcagtttgtccgcgatctgcatcagcgtgggtttgaggtgttcctggaccttaagtttcacgatattcccaacaccaccgcccgcgcggtggccgcagcggctgagctgggcgtatggatggtgaatgtccatgcttccggcggcgcgcgaatgatgaccgccgcgcgcgaagcgctgctgccgtttggcaaagatgcgccgttgctgatcgctgtcacggtgctcaccagcatggagtccagcgatctacaggatctgggcattaccttatctccggctgactacgcggcgaagctggcggcgctgactcaacgctgcggccttgatggggtggtgtgttcagcccaggaggctgtgcgctttaagcatgagctggggcaggcgtttaagctggtgaccccggggattcgtccgcagggcagcgacgctggcgatcagcggcgaattatgactcctgagcaggctcaggaagctggggtagactatatggtgattggtcgcccggttactcagtcggcggatccagccgcgacgctgcgggcgatcaacgattctctgcgcaagggggcataatgagcgattccaacagccgtctggtctactccaccgaaaccgggcgtatcgacgaggcgaaaccggcgccgttgcgcccgaaaggcgacggcattgtgcggatccagcgccagaccagcggccgcaagggcaaaggcgtctgtctgattagcgggattgatgccgatgatgctgcgctaaccgctctggcggcagagttgaaaaaaaagtgcggctgcggcggcgcggtgaaagatggcgtgatcgagatccagggcgataagcgggatttactcaagtcgctgcttgaggcgaaagggatgaaggtcaagttagccggtggctgatcgctattttccctctgctccaatggtctggttgaaataacaaggccgcggtaaatgccgcggccttgaatgatttaacgtgcgtaagtcaattcgtgtgaattattcttttatttcgtcagataattaaattattttccgacctggtgaccaataataccaccgactgctgcgccacccagggtaccgagcgcgctaccgtcagttaacaccgcaccaccgatagcgccggcgccagcgccgatagccgtgttacgatcgcgtttagacatgttagagcaagcgctcagagacattgctacagtgacagccagaacgacagcagccatttttttgctcgttgaagtcatcattttttttctcctgaataatctattcatggattacagcgctcctctaagcatagcctgataaagcagctttagggcaattccatgaagttaaggtgcgcaggtgtcacgaaaatcacgcaggtgatagtcacttcctgttatatcgctaataataattttactttttttaaaatttatcgtcaggtaaaaagtcttaattagcggctcggaatactctcagagcgataaagcgccccttccggcgctttggcaggagatggggcgacggaggatcagatgtagggcacgatatcgacggtcaggccgctgcggagcaattgttcgcgacaggcgtccggtaagcgatcgtcggtaataacgcgattaaagcggccggcgggaccgagcggatagggatgtaccgcgctgaattttgaactgtcgctaagaataattgcctcacaatgcttctccagcacggcgttcaccacgtccgcacgcatcatatcgcggccagtaaagccggtttccgcctgccaaccgtcgatcccgatgaaggctttgctgaaatgcacctgctggatgaactgacgggttagcggaccgaccatactctcactgcgtttctgataaattccgcccagcaggatcacctctcctggggtctctttcagcagatgggcgatatagctgctgacggtaatgatggtgatatcgccgcgctcggccagcgtacgcgccagcagggcattgctgctgccgttttcgataaataccgtttcaccggtattcactagcgccgcagcccggctggccagctcacgcttaatggcgaaatgggtcatcatgcgggtttcgacatcttcgctgtccagcggtacggcataaccatgagtacggcgcaaatagctctgcttttccagcaaattcaaatcctgacgaatagtaacctcagagacaccggtcatcttcgccagatcggcgacgctcatgcggcctttatcgatgaccacttgcaaaatactttgttgtcgggcgttcatagcaacatcactgttagggggctatatggcgagcaaccggtccatatggccggctgcggcatggctgatattcagatttcccagggcgccttgggttggttttgttgttcagcatcgtccgccgccagcgccagcagctccgctttgaggatctccagattatggatcgcagaatggtaatcaccggcaaccagaatatccagcacggtatcgatacgttgagcgagcaggtgggcattcacatctgacatggcattatcctggtaacaaaaacgaatgaaatcaatgatgctaaaaatgaatgaaaaagagaagcgaaaaaaacgcacaaccttaatcggtgcgacggaaatggctggatagagaggaaagaagcagcggttcccgcaggaaccgctgtgaaggggcgtcagaccgccggacgcgcaataatgctgcgggtttccatgcgaacttcagcgatagtgacatcgataacgtcagtcactttatagactacttcacctttgatctgcacggtaccgttctcctggctgcacaccagttcgtcgcgcacggcgtggaggaacggggccggaataaaggcgaccgcgccattgtccaccagacgcacgcgcatcccgccgcggctgacgtcgatgatctccgccgcgaagcgggtatcggtcccggctttatcgttgaggaaacgggcgtacagccagtcggcgacgtcgcgctcggccatccggttgagacgacggcgctccgccatctgcacggtggcttcatcctggggacgcgcaatggtctcgcctttaatgatggctttcagcagacggtggttgatcatgtcgccatacttacggatcggcgaggtccaggtggcataggcttcaagcccaagaccaaagtgcgggcccggctcggtgctgatttccgcaaacgactggaagcggcgaatgcggctgtcgaggaaaccggtcggctgagcgtccagttcccggcgcagcttgcagaacccttccagggtgagcacttccgtcgggtcgacgtgcacatcatgggttttcagcagggcggccaactgctcggtattcgccgggtcgaaaccggtatgaacgttataaacgccgaagccgagcttgtcgcgcagaacgcgggcggcacagatgttggcggcgatcatcgactcttcgacaatgcggttggcaatgcgacgcggttccgcgacgatatccagcacttcgcctttttcgccgagaacaaaacggtagtccggacggtctttgaacaccagcgcatgggtctgacgccattcgctacgacgctggcacacgtccttcagcagcgtaatttgctgcgcgatcgcctcgctgtccggctgccagctgccgcggccttccagccagtcagagacgtcgtcataggccagcttggctttcgattcgatggtggcggcaaagaactcgatattgtcttcgatggtgccatcggccgccagagtcatccggcaggccagcaccgggcgcacttcgttagcgcgcagggagcagagatcgtccgacagctcgcgcggcagcattggaatgttgaagcccggcagatagttggtaaaggcgcgcacttttgcggcgttatccagcttgctgccttcggcaatccaggcggtcgggtcggcaatggcgaccgtcagcagcagtttgccatcagcagtggactcggcatacaacgcatcgtccatatcttcggtgctggcgctgtcaatggtgacgaagtcgagggcggttaggtcgcggcgcgtcagcccctcgtcgagcatctcggtggcgacgccgtccggtgcctctttctcaagattatggcgcgccagggttacccaccatggaacgaagtggtcgtcgctaaaagtgatgaactgggtcaactccgcgtaaaatccgcggtcgccttttaatggatgacggcgcatctcggcgacggcccagtcaccctgtttaaaatcgtgctcaacgccgcgggcggcgcggcagggaatggcgtctttcagcagcggatggtcaggaacgatagcgaggcgatcgtctttcttctggactttaccgacaaaacgagtcaggaagggctcaaccagcgattccggctcggcgctttcgcgttctttttcagaatggatcaccgcgacgatacggtcgccatgcatcacttttttcatctgcggcggcggaatgaagtagctcttctgagcgtccacttcgaggaagccaaagcccttttccgtgcccttaacgaccccttccgcgcgcggcgtctgggaatgcagttgctgtttaagctgcgctagcagcgggttatcctgaaacataattaggtattttcgtggctaaaagagcggctgacatttttacgcgaatatgcctgccgcagcaagcgctgtttcagcaatttacgtctgctgacgcacattgccgagggcgattttcagacgattcatccatccgcacagcccgctccagatcaacagatcgattgcttgttgcgcagagagtcgatattccgcgaggggcgttaactgggcggcgctaaaccggtcaggcgagcgggttaacagctgcaccgcggtcacgagagaccgggcctgaggatgctgctggagccagtgatggagggcctggtcgccctcccgcagatggctggcgaactcctcttcaccctgccagtgggggagccaggcgtcaaaacaggtggggctgccattggtgcgcgccgtgagtaaggcgacctgcggaccaaaggtatcatccgtgctgaactggcggatcaagatctccagaggcgcgaataactgtgggtcgcaggccagcagcggcgccagctcgcccagaccgggcagcgactgccagccggcgatgcgccgctgacgctcatcatcggcatactgcaggtcgggatccggaatgtctgcctgccatgctcccggcggcggggcgaacagctccgcgggtgcctcctcttgctggggcataccggggatccagcgcaccggaaagccctgggccgcctgcaggacggcaatcgcccgcgcctggaagccgacgaatccgataatctggttgaacagaataatgtcccgactggttaagcccacttcgtccagctggctacgggagagagcgttaataaccgagggcgaaccggcaagctgacgagcatattgcgtgatttgcgccagacgacggttgctctcacgcgaggagtcggggcctggcaggggagcaaggcgggcggcgtagtggttacacagccgctggacgccgtagacctgggcgacggtgagcgcggtgctgagtcgatcgtaagcggtaaaggtctgcaggcgactcaccgccacctggtcgggaaacagcagttcggccagctggcgtgcggggtgtagccagtcagcgtgggcacgtagccaggcggccggcagcgtcaggtccagcaaaaagcggtcttcaacatgggcggcttcagggacgagcggcaggacatccaccgggcagattgttgactgggtttcgtgataccagtgatttttgccattcacgcggcgtggctccatgggctttccttgttcggtatgtggcgaaccgccgttccgcggatcgtttatgcagaactatcctggcgtaacccggaagcaggagaaaatattgatacgtgctaacaaatagccgattggaataacaggtggggcgtaaggcgtgggggagggaagaaccctcctcaccggggcgaggaggggaaggaacttatttcagttccagctcgttcatggcggcgatattgaacccgccgtcaacgtgaacgacttcaccggagatccccgcagacaggttggagcacaggaaggctgcgctgttacccacatcttcaatggtgacggtgcgacggatcggggtgaccgcttcgcagtgcgccagcattttacggaaatctttaataccggacgcggccagcgtacggataggaccggcagagatggcattgacgcgaacgccttccggacccatggcgttagccatatagcggacgttagcttccagagaggctttggccagacccatcacgttatagttcgggatcgcgcgctctgcgcccaggtaggagagcgtcagcagagccgaacccgggttcagcatgccgcggcaggctttggccattgctacgaagctgtaagcgctgatgtcgtgcgcgattttaaagccgtcgcgagtgacaacgtcaacgtagtcgccgtctaactggtcagccggggcaaaaccgattgagtggacgaaaccatcgaattttggccagactttttccagctcggtgaacagcgcggtgatgctctcatcttcagcaacgtcgcacggcagcacaatgtcagaacccagcgcggcagcaaactcttctacgcgacctttcagtttctcattctgataggtgaatgccagttccgcgccttcgcggtgcattgcctgcgcgatgccgtaggcgatggacagtttgctggcgacgccagtgatcaaaatgcgcttaccggaaagaaaacccatagctttaatccttatcgttattgcttatttttactttaacaatcataacgttaacattgttatttcaaaataactcaaatttagccgggaattatatcccactgacgaccccttgtgtcacgatatttttcagccggtccgcgccgcgcggggcaaaagtacatcgcgatagctgcagtatatcatctctcctgacgattatttgagcgcgatctccgccagcagcaggcgtccattgctgcccacgggacgcagattccgcggggatccaccgcgccagcagaggccgctgccggccgcgcagcgtcgcccggccagatcccactcgccttgtagaacataagcgaccccctcgctggcagggcattgcaggtcgctaacgacctgaactgtcgccgacgcgcgcccgcgctgagtcatgatattgaagtccagccctggcgcaacgatcccgacgctggacagcgcccattcgccggggaaagcccacggctgccagagcgccagcggttggtcgatattctcgccacacagccgtagcggctgccccgccagcagagtaatgacccggtcgacgccaggaaagggggagaaagggccatccgcctgcagggtggcaatactcgctcgccagagaaaaggggcatctggagcgggtacgcagatgatttcgcgcgtctctccgccgccgtttttccacggcgtgacggggagcgtcgaaagttgaaaagggaccatcatgggcagcataccttagttaatcgcttccggcgtcaacaataagcaccgccttgagctagtttagtaactttctgcaatacaaatattttacatattcgtcacaaagtgagagtgcatgcaaggcggtgagttgtcaatgcttgtatatacaagaacgattgagtgaggtgatattaataacttgagtgaggaacctatgtcttcgttttcgtctacagacgggcagtcaaagagcaattatgctggaatgagtgaaaggcggtcgattgattacatcccggaaagcgaacggcatggacacccttttagccagttcaccctttggtttggcggcaatctgcaaattacggcgattgtcactggcgctttagccgttgtgctgggcggcgatgtagtgtggtcgctggtcgggcttctggtcggtcagatgctgggggcggcggtgatgtctctgcatgcgctgcagggaccgcgactgggacttccgcaaatgatccttagccgcgcccagtttggggtttttggcgcggtggtgccgctggtgctggtttgcgtcatgtatatcggtttttctgccagcggcaccgtattggccgggcaggcaatggccaaactactgaatatcagccacgtagccgggatgctgatattcagtgcgattattatcgttatcgccgtcctcggttataaggtgatccacaagctgggcaaactggcgagtatcgtcggaattctcgccttcgtttatatgttcatcacgctgctactttcggccgatctcagtgcgctcgcgcacaataaccatttttcgctgccgacgtttttattagccgtatcgctctcctcatcgtggcagatcgctttttgcccctatgtatccgactattcgcgctacctgccacgcgatgtttccgccacgaaaacgtggtgctcagtgtttttcggcaccgtattgggtacccaaacgtcgatgacgctcggggttctgacagcggccattgccggcagcgcgttccctggtcacgaggtgagctatctggtgggattaggtaagagtcaggcgatggccatggttatctatttcgccatctgttttggtaaaattaccttcactaccctcaatgcgtacggcagctttatgtcgctgaccaccattgtttccgccttccgccggcaaaccgtgctgtcgcaaaagtgtcgcattgcattcgtggtgctgatggtgacggcttcctgcattatcgcgttgcttagcgaacccgctttcttaaagcatttcacgcattttcttctgtttctgctggcgttcttcgtgccgtggagcgccatctgtctgacggattattatcttatctcgaagggcgccatcgatattccggcgctaagcgacccgcagcaacgctacgggttctggaacctgtacgcgatcaccctgtatatcgtcggtgtgcttatccagttgccgttcattgagaacccgttgttccatggttcgctcacgtggatcttcgccggtaacgatgtctcatggataataggctggtttggcaccggggttctttactacgcgctgcgccgctttgaccgccggtcgctgccggcgcagagtcttttcccttctacctgaatgacaagggcggcgtgagggccgcccctgccgttgcctgccagctatttcccgtctttgcgccaggcgtcggcggtgagggcttccccgaagtggccggcgatcaggcgccgggtcaggtcgtgcagcggcgaggccagcacatcggcagtgctgccgcgctcgaccacttcgccgttatgcatcaccagcacctgatcgctgatgtgtttcatcattcccaggtgctgagtgacatagatataggagatgccctgtttctcctgcagctccagcatcaggttgataagctgggagcgcatcgacatatccagcgaggccagcgcctcatcgcagacgataaccttcgggcgcaggatcagcgccctggcgaggccgagacgctgcttctgaccgggcgccagcatatgggggtagtagctgacgtggtccggcagcagaccgaccatgcgcagggtgtcgattatctgcttctgccgcgcctcggcgtcgagatcggtattcagtcgcagcggaaaatcgaggatctgcgagatgcgctgacgcgggttcagcgaggtcgacggatcctgaaagatcatgcgaatcttctggctgcggtaggagtaatccccaaaagtcagcggatgatcgtcaatcagcagttcgccgctggtgggttccaccatgcccgccagcatcttcgcgagggtcgatttcccggagccgttctcgccgataatcgccagcgtctgccgttcgcgcagggtaaaactcagcggtttaaccgcctcaaccgtctgacggtgaaaccagccggtgcggtagcgaaaggtcttactgagttggcgaacttccagcaatgtttcgaccatttcactctttctccatgttcaacgggaaatgacaggcgtacagatggttgcgcgccccggtaagacgcggcgtttcgatacactcgcgctgggcgtacgggcagcgcggccccagccgacagccgataggcaactgctccagtagcgggatcgctccaggcagggtgttgaggcgacttttatgcggcatggcgctaccgaaatccgggatcgcgcggattaacgcctgggtgtaggggtgatgtgggagggtgatcagctcttcgctgggcccactctccaccgtctgcccgcagtacatgacgttgattttatccgcccatttgctgagcatttgcaggtcatggctgatcagcaagatggtggtgttgttgttctggttgagccgcgtcagcaggcgaataatctgcgcctgggtggtcggctccatggcgttggtcggctcgtcggcaatcagcagacgcggctggttggccagggcgatggcgatcatcaccttctggcactcgccctcggtcagctgataggggaagctgcgcatggcatctttgtgatctttaatgccgacgcggtgcaacagctcgatggcccggcgcttgcgccagcccagccgttgccaccagcggcccttgtaggtccagccggggatactctgaatcagctgctggccgatgcgctcagagggatcgaggcacgactggggctcctgaaaaatcatcgacacgttatggccgatcagcttccggcgctcgcggttcgacagtcgcagcaggtcaatgtcatcgaagcgcatgcggtcggccgtgacccgccagttgtctttggtcacgccgcagatagctttggcaataaggcttttcccggagccggattcccccaccaggccgcggatttcgccttcggtcagcgtcaggctgacgcgatcgacggcttttacccagccttcgctggttttaaattcaatggttaagtgacgaatatcgagtaacggcattattctaccccggcaatgatcgcccggcgaataccgtcgcccagcaggttgaccagcagtacgctgagcataatcgccgccccggggagcatcacggtccacggcgccacatagataagctccagcgcatcgcccagcatggctccccattccggcgaaggcagctgggcgccgagatcaagaaagcccagcgcggcaatatccagaatagccatcgacagggcgcgagtgatctcggtcaccaggccggaggcgatattgggcaggatggcgaacagcagaatattcagcgtcgaggcgccgtcgaggcgggcggcgatgatgtactctttttccagctcatcgtggaccatgctgtagacggagcgcaccatgcgcggcagcagcgccagccagacggcgaacatcgcatggctcagatgcggcccggcaaaggcgacgacgataatcgccagcagcagcgaggggatggagagcagggtgtcgaggatatggttcatcaccgccgagcgcaggccgtgggtcgatccggcaatcacgcccagcaccagaccaaacagcgtggcgccgagggtgacgacaaaagcgccgccgacggtgggcgccgcgccgctcagcagtcggctcagcacatcgcggccgaggtcatcggttcccagaaagaaggagacttcgccatagcgcgaccacgacggcggcaacagctggtagccgaggaactgctggtcgatgccgtagggggcgaaccagccgccgaagacgcagagcagcagcaggcccgcgcagccgtacagaccgatcatcgccgtggtgtcgccatagaacttacgccatacggtgcgcagcgcgccgggcggacgcttttccagataaacgctatcgtagggcataccattccttatgtttcagtgggttagccatggcaccgagaatatcggaaattacgttgacaataatcaccagcgcgccaatcaccatcactccggcggagatcgccgcgtagtcctgctggcgaatggcgttgatcagccagcggcccagtcctggccagctgaacaccatctcagtgatcatcgccagggtgagcatggtggaaaactgcaggccgagacgcgggatcaccggcggcagggcgttgtgcagcacatggcgcagtagaattttgcgtcgcgacacgccgcgggtggcggccgcttttacatagttagtgtcatacacctcgctggtgctaatgcgcatcaggcggatcacttcagtggtgggggcgaccgccagggtcaataccggcagcaccatatgccgggcggcgctgacgatcatctcatggcgccacggcgagtccgaaagccaggcgtcgatcagcgcgaaaccggtgacatttttcacctcatacagcagatcgaagcgaccggagaccggaagccagccgagggtcagggaaaagaagagggtcaggagcagcgccagccagaagaccgggatcgagaaaccgaccagcgcgacggcgctgatcagggtatcgggccatttattgcgcattacgccggcgatcatccccaccggaatgcctatcagcagggcaaagccgaaggcgaggatgcacagctccatggtcgccgggaaaacctcgcgcaactgctcagaaatcagctggccgttaatgctggagacgccgaaatcccagtgcagcaccccttcaaaccagaacagccacgcattccacagggaagcgccctgcagtggggcatgaggggtgaaatagctcaggctgaaaccgacaaaggtcagaaaaaagagggtgatcagcagcagcagcagacggcgcagggtaaaaataatcatggctttttcacctcttcggtattttcccgcgatacgccagcgaacgaagcgttaccgaaagggctgagcaccaggcctttcatatcatagcggtaggcctgcagccgcagcgacgaggccagcggcaggaccggcagttcgcgggcgaggatccgctgcgcctctttgtaagcgtccatccgcgaggagagctgctgcgagagcagcgctttttgcagcacgtcgtcaaactcccggttacaccagtgggcaaagttggtttgcgaggcgatggccgcgcagctcagcagcggtcggaagaaactgtccggatcgttactgtccgtcgcccagccggagagcgtcaggtcgtggctcatgtccatcaggcgcgcctcctggaaacgtccctctaccggcacaataatcaccttaacgccaatctgcgccatatccgcctggataagctccgccgttttcagcgggctgggattccacgcctgcgagctggtgggcacccacagcttgagggtcaggttttccagccccagggctttcaggcgggcgcgggcctcctgcggattatattcggtaattttagcgtcgttatcgtaggcccacgaggcccgcggcagcatggacgccgccgtctccgcggtgccatagtagatggactgcatcaggcgctggttgttaatcgccagcgccagggcatggcgcacctcagggttatccagcggcggcttggcggtgttgaaggccagccaggcgatgttcattcccgggcgcagcgtcaggcgcaggcgcgggtcgtcacgcaggatcgtcaactggctggcggccggccaggccagcacgtcgcattctccggtcagcagtttcgacaggcggccggtgccgccggagccaaggtcgaccaccacctggggcatcaacggtttgccgcgccagtagccggggtggcgctgcaggcgaacatattgtccggagcggtaatcggatagctggaacgggccggtgccaaccggctggcgatccagttgctcctggcggtcgtcctgcgttaagcgggcggcatattcggcagaggtaattgacgcatagtgggtggccagatgccagaggaacgaggcgtccggccgcttgaggcgaaactccacggtctgattatccagcttgcggacgctctccacgctgtcagcaaactgcagactgtcgaagtaggggaagctgctgccgttgacgttgtgccacggatggtcgcggttaaaaatacggccaaaggtaaaaatgacgtcatcggcattaaagtcccgcgtcggggtaaaccacgccgtgcgttgaaacgggacgtggcggcgcaggtgaaagcggtaggtggcgccgttatcgagaacttcccagctctccgccagctcggggaccagccggtaggtatagggatcgacgtcaagcagacgatcgtagatctgagcggccagcgtatcgacaatcaggccgctgctgactttctgcgggttaaaggtattaacctggccgctgacgcaatagacgaaaccgctatcgcggatatcggcgcggtcggggagcgcaggggcggcaaaagctggcccacacagcagggaaacggctgccaggagagatgacaatttcaggcgcatattttctgtttgattatagagctgaactctatcttattaagattaatagacattcaccaccgccttcaacaagcctgagggataatgcggttaccgggtgcgtatagtattcggtcaattgattaaaatagtcgcggaaccgagtctgtatagtgaaacatggtaactttttatcgccgatatcgccagtcagctctgtttggccgcggttgaccaaacggcgacgacgtgcggacgctagagaatagattcagtatagcggggagaaagccgatgacccgacgggcgactagccgtacccgtcgggggtgatacagggggagcgtgtttcgattattgtgacagtgtcactttatgatagtccatattctgcaggtcctccagcagcccggggccaaccggctgccactgcaagcgctcgcgggtccatgccgagctggcgcgcaggtcaagggcggtaaacggcgcaaaccagccgaaccaggcgtcgacctgcgactcatccaggtgggtcagcggcaggtttaatccgtgggcaattaccgcggcaatatcgcgtaatgcgatcccctcttcggccaccgcatgatagcgctcgccggccgcgccctgaagcagcgcgctgacatacagacgtgcgacgtcatcgacatgggcggctgaccagcggttgcttccctcgccgcgcagggctaccgccccgttggcgaccgcgcgttcgatgtagcaggtcagcagtccctgacgcacggtgtcatgcacctgcggtaagcggaccaccctgacatccactcccgcctccagcaactgctggccggcgagctctgaggcgatgcgcgggctggggtgccctgagttgaagaacgactcccgggccggggcgccgctcccgtcgtcgcccatcagcgtgccggaggtgatcaccagcggccgcgtgctgcctcgcagcgcctggcccagggccaggatcgcctggcggtctttctcgcagttagcggcaaagcggctgaagtcgtggtcgaaggcggtatggatcaccgcgtcggcgttcccgacgccagccagcagcgactccggggcatccagcgtgccgcgatgcacctcggcgccggccgccttcagggcctgtgcggtgctttcgctgcgcgcgaggccgataacctgatggcccgacgcctgcagcgccggaagaatacgtgagccgataaatccgctcgcgccggtaagaaatatacgcatcatggatctcctgaatgggtttcaggcgtatcctacctgcgatgtcatactataaaagtagagacattatcggggtataaattctaacaggcagaacccacaggcagatgatgaacacttctgacaaccatgctttaggcgattttctccgcgcccgccgccagcgtctcgatccggcaacgtttggcttcccggcgggacgccggcgcaccccggggctgcgccgcgaagaggtcgcgcagctcgccagcatcagcccgacctggtatacctggcttgaacaggggcgcggcggggcgccttcccgcgaggtgctggagcggatcgcccgcggtctgcggctgaccaccccggagcgcgagcatctgtttattctcgcctttggccatccgccgcagacgcgtctgacggtgacggatgatatgacgccgcggctgcagcgggtgcttgacgctttcaccattccggcgattatccgcaccgccagctgggacgtcatcgcctggaacgcgccggcggccagggtgctgaccgactacagccaactgccgctggcggagcgcaacgtgctgcgccgcctgtttacccggccggaggcccgctgcactctggaggactggcagagggtggggcagcttatcgtcaacgccttccgcgccgacgtcacgcggatgggcgccacgaaagaaactgaccagttgatcgcggagctcagccagcagagcgtcgagttcgcccgtttctggcaaagccatgacgtcgccggtcatggagaaggctataagcgcattaaccacccggagatgggtccgctcgacctggaatttacctcctttgccgtggagggccgtcccgatctttccctgctggtctttaatccggcaacgacggagagccagcggaaaattcacggtttacttcagggggcgggatccgcgccggaggagagctgaggggtaaattcatacagcaccagcgcattgctctgcagcgagtcgatccgcagccaatagccatcgagcctggcttcatccacgctgagcgccggacgggcctgatgcatcagccactgataatcctcggcgtcagggccgctgcggctgcgaaaggcgtccaccagcgggaacaacgcgccgtggtgctgatcgaacaggtgctgtttgatgcgccagctgccatccaggccctgcagccgcacgctgtagagctggctgaagcgctggataaaggccgcttcgctggagagccagggattgtagaccaccgtattgcgcagcagcagctgatagtgaccctggtggtggagcagcagcaggtttttatcgtgaaccaggatctcgccgcgcagccgccgccagagccagagtacccagtaaaccgggcgcggcaggccgtgcagatagtgcagcgccaggctggaggtatcgagcttgccgttggcgcgagcttcgccctggaggcctgaatttaaccagaagcccgccagccagacctggtccgccacccccagcagattatccatcagcagcgcgccgcgaaaaaagcggccgttggtatcccgcgtatcgccggtcagcgtattccaggagagcagccacagcggcaggttgagctgacgctggcgcagggcgctgtggatctgccgcagcttgtgcagcgggtaatgttcgctggaggccaggcggctgctgtctgcctgggccagatccagctgttcgttggcatctgcctggcaggcgagaaaatccgcctctgccagcagcggcgagtggaacagcggatcgttcccgggatcgctgggagcaaagcggtgccagatccccagctgcggctgcggcagcaggcgatgaaggaccccgcgctgctgccgccaggcggcctggcgcgcagcttcgctggcctgcggcgaccagtgccagacaaagcgccagctgttgagcgtggctggcggaaaatggttggcggcgagctgcaggaagcgctgcagcaggtcactgcgggtggtgacgccggtgtgcaggatcacctgccagcccatcgccgccagccagctaaaaatctgctgcaggttgtaccagcaggcgtagccggccatctgcggatcgtcccagccggtgccgaacagccgactgctgagaaagggatcgttgatatcgatggcatacaccggcagggcgtggtgcagctgttcgagttcccggcgcacatcttcacgcagcagatcgtccagttcgcgcacggtcaccaccatccgggtatggcgcagcgctgcggggcgcgctggacgatcgcgcagattgatctcccgggtctgcggtgggttgatcggcagggggggactttcccggtcgcgtggttccggctcattgagtcgcgcatacagccggtcggccgccaccggctgccagcgatcggcctgcggcgggcgcggtcgggcaagctccagaggatgctgttcacgatactggcgcggcgtcacgccgtgctggcgcttaaacaaatcgctcatcattcgcgtactggcgaatccctgttcgcgggcgatttgctggacggttttgcgggtggttaatagctggtcggcggcgtggcgcaggcgcagcgcggtgaggtactggacaaaacttaccccgacctctttgcgaaataagcgtgacagccaggcctcggagacaaattccgcggccgccacctcatgcaacgagaggcgacgctgatagttagcgtcgatccgcgccaccacgctggctattctccggctccatttttcggtatcgcgccggggcgtggaggcgatgggctggctaaagcgcgtggccagcagcagcgctatctcactcagccagcggttggcctccagtcggtaatggccaggatgattgaccaggccgctcaccagcagctggcgcatcaggcggcgcaggccgtcatcggcatcccgggtgcgcggcgttatctggtaatcgacggcaaaaaaggcattatcgaggcgggccagccagttggcggagagggtgaggatcatcacggcgttggccccggcgctgcgcaggctccagcgacggttgcggttaacgatcgccagcccgtcggcggcgagcggctgcgacgcaccttccgccaccgccagatttacgcttccctccagcacccacagcagcgtcagcagatcgctttccggctgggtcagctgacgcacatcgcgtacggtgacgctaaagtcgcctgcatgctgctccacatgactctcctctgtagacaaaaaacaaccggttgttttttgtcataaccgatatgtatgaaaaacactcattgatttttcgtcaatataaaacaaaaaagcgcgcctgcaagctgagccacccgcataaactcgaaagtgtcgtgcaaacacaacacaggaataacaaaaatgacacatccgttgctagaagcattgcaggttaacgaggcgcaatttattgctctgcgtcgtcggttccaccagcagccggagatcggctttgaagagcaccagaccagcagcgaggtcgcccgactgcttggcgagtggggatacgaggttcaccgcggcctggcgggcaccggagtggtgggcacgctgcgcgtcggcgaggggaaaaaacgccttggcctgcgggcggatatggatgccctgccgatgcaggagcggagcggtaagccgtgggcaagccaggttgaagggcgctttcacggctgcggccatgacgggcacactaccacgctgctctacgcagctgaatatctggcgcgcacccgccagtttaccggcacgctgcagctgattttccagcccgcggaagagttgctgtacggcgggcgggtaatggtcgaggacggtctctttgaccagttcccctgcgacgccatcttcggcctgcacaatatgccgggtcagccgttgggcaagatcggcctgcgcgacggggcgatgatggcctcctcggatacgctgcatattgaagtgaagggcgttggcggccacggcgcggtgccggagcatacggtggatgccacgctggtggcctgccatattaccctcgcgctacagtccattgtctcgcgcaatatcaccccgtttgaaccggcggtggtgaccgtcggcagcatccaggccggtcatgcgcccaatatcattaacgatcacgtgctgatgaagctcacggtgcgcaccctcaatgagcaggtgcgcgagaccgtgctgcagcggatccatgatatcgccgtggcccaggcggagagcttcaatgccaccgccacgctgacccacgtcaacggcagcccggtgttgcgtaacgatccggcgacgaacgccatggtgcgggaggtggcgacagcgctgtttggcgcagagcaggtgggcgaggtgaagccgtttatgggcagtgaagattttgccttcatgctggagcagcacccgcatggcagctatttcaccatcggcgctggcgatgagccggatcgctgcatggtgcataacccggggtatgacttcaacgacgcgctgttgctgaccggcgcggcgctgtggtgtggcctgacggaacgctatctgcgctaatcacgagaaacgggagggccatgcgatgagcactgtcacaataagcgacaccccgtttgtcggcaacgatcgcctgctggtggggattgtgttaagcgttttaaccttctggctgttcgcccagtcggtgattaacgtggtgccggcgatgaaaagcagccttgatatctctcttgaaaccttaactctggccgtcagtctcagcgcgctgttcagcggctgcttcgtggtcgccagcggcggcctggcggacaagtttggccggatgcggatgaccaccctcgggctggggctgagtatcgtcggcagcgccatgctggtggtcgctcagggaccggggctgttcctcgcaggccgggtgctgcagggactgtcggcagcctgcattatgccggcgacgctggcgctgattaagacctggtatgaggggcgtgcgcggcagcgggcggtcagcttctgggtcatcggctcgtggggcggcagcggtctctgttccttcgttggcggggctatcgccaccggactaggctggcgctggatcttcgtcttctcgatcgccgttgccctgctggcgctgtttttgctgcgcggcacgccggagagccgcagcgccagcgccagccagcataagctggacgtcggcggtctgctgagcctgattgttgtgctggtgctggtgaatctgtttatcagcaagggccacggctggggctggagcagcccgctgtcgttgaccatgctggccggggcgctggcggcggggacgatatttatccgcaacggcatgcgcaaaggcgaggcggcgctgattgattttgcgctgttccgcaatcgggcctacggtgcggcagtgctgtcgaactttctgctcaatggggcgattggcaccatgatgatcgccagcatctggctgcagcaagggcaccacctgacgccgctggagagcgggatgatgaccctcggctatctggtgaccgtcctggcgatgatccgggtcggcgagaagctgctgcagcgctatggcgcccggctgccgatgatggccggtccggtgttgaccgctatcgccatcgcgctgatatcctgcacctttctcgaaaaggcgctgtatatcggggtggtgttcgccagcaacgtgctgtttggcctcgggctgggctgctacgccacgccatcgacggataccgcggtggccaatgccccggagaacaaaatcggcgtcgcctcggggatctataagatgggcagctcgctgggcggggcgatgggtatcgccgtgacagcgtcacttttcgcgctgtttttaccgctgggcatggcccatgccgcccagtatgccctgtggtttaacgccgtcttatgtctgggggcgatggcggtgagcgcgctgctgctgccgcgcgcctctcacagctgatgctttttcagcagcgcgcggagctggtgataggttaatcccagcagctccgccgcctgcttctgatgatacttcgcctgctccagactccgctgcagcaggcgtttttcctgctggagctggaaatcgcgcagatccagcggtagcgcgggcagctcatcgccgggcgcggcttccggcggagagccgggggactgacgaaaagggttaataataatcgcgtccagctcatgttcgctgtcgccgtggcgatacaccgagcgctcaaccacgttcttcagttcgcgaatattccccggccagcggtagccgagcagcgtcgcggtcgctcgttcgctaaagccgggaaacagcggcagaccgagttcgcggcacatctggatggcaaactggttggcgagcaacatgatgtcgctctgccggtcgcgcagcggggggagctgtaccacgtcgaaggccaggcggtcgagcaggtcggcgcgaaaatgaccttcctcgaccatctgcggcaggtcagcgttggtggcgcacaccagccggacgttaacctgcagcggctggctgccgcccacgcgctccagctcgccatattcaatcactcttaacagcttctcctgcaccagcattggggctgtcgccagctcatcgagaaacagcgtcccgccgtcggcgcgctcgaagcgcccgggatggcgcttgctggccccggtgaaagccccggcttcgtggccgaacagctccgagtcgagcagattatcgttcagcgccgcgcagttcaacgagataaacggcccctgccagcggctggagaggtagtggagacggttagcgataagctctttcccggtgccgcgctcgccgatgaccagcaccggtttatccagcggggccagccgggaaacctgttccagcacctcgagaaagctgttggcctcgcccagcagattatccttgtactgcgccatgatgaatttcgccattaagtagtgtaattaaccaggtgactgtagcaatgcccagcacgtttcgcaaccaccctgttaaaaatcaataagataaaaagttggcacgccatttgtattagctaagccacaggtgaatgcctgaaaccagaactatgaggattgaaattatgggtattttttctcgttttgccgacatcgtgaacgccaacatcaactccctgctggagaaagcggaggacccgcaaaagctggtgcgtctgatgatccaggagatggaagacacgctggttgaggtgcgttcgacatcggcccgcgcgctggcggaaaagaaacagctgtcacgtcgtattgagcaggcggtcgcccagcaggcggaatggcaggaaaaagccgagctggccctgcgcaaagagaaagaagatctggcccgggcggcgctgatcgaaaaacaaaagctgaccgaccttatcgctcagctggatcatgaagtgcagctggtggatgaaaccctggcgcggatgaaaaaagagattggcgagctggagaacaaactcagcgaaacccgcgcccgtcagcaggcgctggcgctgcgccatcaggcggcgagttcgtcccgcgatgtgcgtcgccagctggacagcggtaaactggatgaggcgatggcgcgctttgaatcttttgagcgtcgcatcgatcagatggaagcggaagcggagagccaccgctttggcaagcagcagacgctggatcagcagtttgccgaactgaaagcggacgatgaaatcagcgagcagctggcggcgttgaaagccaaaatgaatcagtccaaccagtaagtatgattgcgcggcgcggcgttgcgccgcggctcaccccctgtaaggagtacacatgagcatgctttttctcgccattccgctgacgctgtttgtgctgtttgttctgccggtctggctgtggctgcactacaacaatcgcggcgccaacggcagtctgacgcaaaatgagcagcaacggctgctgcagttgaccgatgacgcgaagcggatgcgcgaacgcattcaggcgctggaagcgatcctggacgccgaacatccgaactggagggacaaataatggccgggctggatctgaataaaaaactgtggcgtatcccgcagcgcgggatggtaaagggcgtctgcgcgggcattgctcagcatcttgatgtcccggtgaagctggtgcgtctgattaccgtgctggcgatgattttcggcctctttttctttgtcctggtggcctacatcattttgacttttgctctggatccgataccggacagcgagctgtacggtcataaagcgccgagcaatggcgatctgctggccgccgtggatgccgaactggcctccggtgaacagcgtctgcgtgaaatggagcggtatgtgacctccgacacctttacgctgcgcagccgctttcgccagctgtaaaccctgtttctaacgaatgaggcaacgcatgaatagcaaatggcaacgcgccgggcagcaggtgaagcccggtctgaaaatcgtcggtaagctggcgctgctgaccgcgctgcgttatggcccggcgggcgttgccggctgggcggttaaatcggtcgcgcgtcggccgctgaaaatgctgctggcggtggcgctggagccgctgctcagccggctggccaaccgcgtcacgcgcgggatgaaataatgccgccgtggggaaggcgcaaaaggattaacgttgtcctgcttatccccggcagatcgcttatgatgacgagacataccttcagggcataacggactggcgatgaagcgactgaaaactgaattgaatgcgctggtcaaccgcggagttgaccggcatttacgtctggcggtgaccggcctgagccggagcggtaaaacggcgtttatcaccgcgctggtcaaccagctgttgaatatccacaccggcgcccgcctgccgctgctgagcgccgcacgcgaagagcggctgctcggcgtcaagcgcgtgccgcagcgggactttggcattccccgattcacctacgacgaagggctggcccagctgtacggccagccccccatgtggccaaccccgacgcgcggggtgagcgagatccgtctcgcgctgcgctaccgttcgaatgactccctgctgcgccattttaaagatacctccacgctgtatctggagatcgtcgactatccgggcgagtggctgctcgacctgccgatgctggcgcaggattatctgagctggtcgcgacagatgaccgggctcctgcagggccagcgtgcggagtggtcggcccgctggcggcagctgtgcgccgggctggatccgctagcccctgccgacgaggctcggctggcggatatcgctgccgcctggacggactatctccacgcctgtaagcgcgaagggctgcactttatccaacccgggcgctttgtcctgcccggagaaatggcgggcgcgccggcgctgcagtttttcccgtggcccgacgtcgacgccgtcggcgaagccaagctggcgcaggccgataaacacagcaacgccggcatgctgcgcgaacgctacaaatactattgcgaaagggtggtgaaggggttctacaaagagcacttcctgcgcttcgaccggcagattgtgctggtggactgtctgcagccgctcaacagcgggccgcaggcgtttaacgatatgcgtctggcattgacccagctgatgcaaagtttccattacgggcagcgcaccttgtttcgccggttgttctcgcccgtcatcgacaagctgctgtttgccgccaccaaagccgatcacgtcacgatcgatcagcacagcaatatggtgtcgctcctgcagcaactgattcaggacgcgtggcagaacgccgcctttgaagggatcagtatggattgcctggggctggcgtctattcaggcgacccagagcggactgattgaggtgaatggcgagaaaattcccgccctgcgcggcaatcgcctgagcgacggccagccgttgaccatctatcccggtgaggtgccggcgcgcctgccgggccaggccttctggcagcagcagggatttcagtttgaaaactttcgtccgcaggtcatggatgtcgatcggcctttgccgcacattcgtctcgacgcggcgctggaatttttgattggagataaactgcgatgagcgaaccgttaaaaccgcggattgattttgatgggccgctgcaagcggagaaaattccgccgctgaaaggcgctcgcgccttcgacaccctggaggcggacaacttcgcgccagcgcggctggtgaccggcgaagaggaagagggggcggcggaagcggtggtggagtcggtcctgcgacccaaacgcagcctgtggcggcggatggtcagcgccggactggcgatcttcggcgtcagcgtcgtggcgcaaggcgtgcaatggacggctaacgcctggcagacccaggactggattgcgctgggcggctgcgtcgccggggcgctgatcgtcggggccggcgtcggttcgctggccaccgagtggcgccgtctgtggcgactgcgccagcgcgcccacgaacgcgatgaagcgcgcgatatgctgcacagtcacgcggtcggtaaagcgaaagcgttttgtgagaagctggcgcagcaggccgggctggatcagtcgcatccggcgctgcagcgctggtatgccgcgatccacgaaacgcaaagcgatcgcgaagtggtgagcctttatgcgcagctggtgcagccggtgctcgatgcccaggcgcggcgggaaatcagccgttcggcggcggagtcgacgctgatgattgccgtcagtccgctggcgctggtggatatggcgtttatcgcctggcggaacctgcggctgatcaaccgaatcgccacgttgtacggcattgagctcgggtattacagccgtctgcgactgtttcgcctggtgttgcttaatatcgctttcgctggcgccagcgaactggtgcgcgaggtggggatggactggatgtcgcaggatctggcggcccggctgtcggcgcgcgccgcgcagggcattggcgccggcctgctgacagcccgtctcgggatcaaggcgatggagctgtgccgcccgctgccgtggatcgccgatgataaaccgcgactcggcgattttcgtcgcgagctgattgggcagttgaaagagaccctgcagaaaagcaaaacccgcccggagaagtaacctccgctcagagacatcgccgggcggcggcttcgccttgcccggccttcgacgtcaagctctggcacgcgcaccctggcaatattcgattaggcgcattccgccgccagccactcgctgaaggcgcgaaagcgcgggcgggaacggttctcctgcggacaaatcaggtcatagccaaagggcgagggcgcttcattttcagacaaggccaccagcctgccggcgtcgagcagcggctggatcagcgttttacgccccatcaccacgccgagtccattgagcgccatctcgatggccagcgagtggttattcaccgcgtaataccggccgtcaaaaggtaacgcctgtccgctgtgctggcaccacaggcgccattccgcaaattgatcctgtacgtcggtggattcgcacgcatggatccagacgagcgccgccgggtcgccgccgctcagcggacgatactgctggcgataacgcggggagcagaccgggagcaaactttccgccatcagccgctgttgataaagatcggggtagcgcgtggcgccgtagtaaattgccagatccacccgctcctcgttaaaatccatcaccccggcgcgcacgcgaaactgcagattcagtcccggccattgcgcctgaaagcgcggcagacgcggcatcagccacagatgggccagcgtcggcgcaataccaatatgcagcgtgccgcgcagatcctgatcgcgaatatcctcaatttcatcgttaatcgcccgcagcgaatggcttaacgtcgccagcagccgcttaccttcctctgtcagcgccagtttacgcgtcatgcggataaacaggcgaaacccgatgtgcatctccagcctgcggatccgatggctgaccgctccctgggtaaggttcatttcatgcgcggcaagggtaaagctcaggtggcgggcggtcacctcaaaggtctgcagcagcgcaaggatgctttgttgctcaagcacagattgtctcccttatgcattaattgagttcatgcataggccgatttaattcgtttgttaggccagttttgccggttttaaatagttatatcgtaactaaaccgaggtataccatgtcaggactcaaaattgtggtgatcggtggtggctccagctacaccccggaactgattgaaggtttgctcaaccgctatcacgaaatgccggtcgcttcgctatggctggtggacattgaagagggcaaagagaaagtcgagattatcgccggactggcgcggcgaatgatcgccaaagccgggctgactattgaagtggtggccacccttgaccgggaaagcgcgctgcgcgatgccgatttcgtctgctcgcagtttcgcgccggctgccttgacgcccggatcagcgatgaacgtatctccctcaagtatggcttgatcggccaggagaccaatggcctcggcggcttcgccaacgcctgccgcaccattcccatcgccctggagatcgctgccgatatggagcgactgtgtcccgacgcctggctgctgaactttaccaacccgtcggggatggtgaccgaagcgatcctgcgccacagccgcatcaaagccgtcggcctgtgtaacgtgccggtgattatgcaaaaagggataaccactctgctgcaatgcgctgacgaaaaagaggtggtgatgcaggtcgccggcctgaaccactttatcttcgtgcgccagatcctgcacaaaggtaaagaatggctgccggaggtgatagccgagatcaacgccggtcgggatccgctggtgccgcgcaacatttcgccgttccgttggccgtcgcatctgctgcagggcttaggcatgatcccctgcgcctatctgcgttattactacatgaaagacgatctgctgcgccaggagctggcggaggcgggcggcgaaggaacccgcggggaagtggttaagcagctggaaaaaatcttgtttgaccagtaccgcgacccgcacctggcagtcaaaccgaaggcgctggaagggcgcggcggccagtactattccgaggcggcctgcgagctgatgaatgccatctacaacgacaagcggattatcatgcacgtcaatacgcgtaataacggcgccatcaatggcctgccggatgactgcgcggtagaggtcagctcgctgattaccgcttctggtccgctacctctcaatgtggcgccgttcccggaagataccctgcgtttgctgcagctgatgaaatcatttgaacggctgactatcgaggccgcgctcaccggcaaccgccacaccgcatggcgtgctctgatgctgaatccgctgatcgtcagcggcgagaagctcgaactggcgttggatgaggtgatcgctgagaaccgtcagtggctgcctgctttccacgcctgacccaagactcaccggccgcctggccggtgatttaaccactgaccgtctgactttacgccacagcgcccatttttccgccacactgtcaataattgttgacagttagcttcccgaaaacccattcctggcctattattctcccgtcattggcacttttagggtgaacactcccatgcgtcttgaagtcttttgtgaagaccgtctcggtctgactcgtgaattgctcgatttgctggtgctgcgtggtattgacctgcgcggtatcgatattgaccctattggccgaatttacctcaatttcgccgaactggaattcgccacgttcagcagcctgatggctgagatccgccgtatcgccggcgtgacggacgtgcgcaccgtgccctggatgccgtctgaacgtgaacacctggcgctcagcgcgctgctggtagcgatgccggagccggtgctgtcgctggataccaaaggtcgggtggaactggcgaaccccgccagctgcctgctgtttggccaaagccaggcgaagctgcgtaaccacccggtggcccagctgatcgccgattttaacgttcagcgctggctggagagcagcccgcaggagacgcatgcggagcatgtggtggtgaatgggcagaactacctgctggaagtgactccggtctatctggaaggagagcataacgagcgagtgctgaccggcgccgtggcgatgttgcgctcaaccgtgcgcatgggacgccagctgcagaccatgaccagccaggataccagcgctttcagtcagatcctcgcggtggggccgaaaatgcgccacgtggtggagcaagcgcgcaagctggcgatgctcagcgcgccgctgctgattgtcggcgacaccggcaccggtaaagatctgctggcccatgcctgccatctggccagtccgcgggcgggcaaaccctatctggcgctcaactgtggctccattcccgaggacgcggtcgagagcgagctgtttggcgacgcgctgcagggcaagaagggcttcttcgagcaagccaacggcggctcggtgctgctggatgaaattggcgagatgtcgccgcgcatgcagaccaagctgctgcgctttctcaacgacggcaccttccgccgcgttggcgaggatcatgaagtgcacgtcgatgtgcgggtgatctgcgcgacgcagaaaaacctgatcgagctggtgcagaaagggcttttccgcgaagatctctactatcgcctcaacgtcctgacgctgtatctgccgccgctgcgcgattgcccgcaggacatcatgccgctgacggagctgttcgtggcccgctttgccgacgagcaggggatcccgcggccgaagctctctgccgatctcagtacggtgcttacccgctacagctggcccggcaacgtccgccagctgaagaatgccgtctatcgcgcactgacccagctggaaggatttgagctgcgtccacaggacattctgctgccggaccatgacgtcgcctcgctgccggtgggcgaggaggccatggaagggtcgctggacgacatcacccgccgctttgagcgctcggtgctgacccagctctatcgcagctaccccagcacacgtaagctggcgaagcggctgggggtgtcgcataccgccatcgccaataagctgcgtgaatatggtctgagtcagaaaaagggcgacgaataatcccgccaggccggcgactcacgtcgccggcatcccggcctgcaaagcgggccaaacctgtatatactggttttttaatcctttttccggggtggtgcatcttggcgtcgcgtcgcgcgatcgggcactggctgatattgctgctgctctctgttctcttttcctcgctgctgttacgaatacacctgccggcagcgctgctgctggggccgctgatcgccggtctcattttgagcctgcgcggggtgaagctgagcatccctcgcccctgttatctggcggcgcaggccattgtcggctgcatgatcgcccgggcgattaatccctctgtttttggcgtgctgttcaacaactgggcgctggtgctggcgatcctgttgaccaccctggcgataagcggccttaccggctggctgctggtccgctacagcgcgctgccgggcgccactggcgcctggggaagctctcccggcggcgcgtcggcaatggtggtgatggcccaggagtacggggccgatgtgcggctggttgcgctgatgcagtatctgcgggtgctgtttgtcgtcggcgcggcggcgctggtggtgcgctatgccctgggcaatgaagcacaggaaatgactcaggatattgtctggtttccatcgttgaccctgaatttccctttcacgctgctgctgacggcggtggcctgttggctgggcatgcggctgcgcatcccctccggggccatgctgctgccgatgctgcttggcgcgctggcccagggcggcggctggctgatgctggagctgccggagtggctgctggcgatggcctatgcggtgctgggctggacggtggggctccagtttaataaagccatttttctgctggcgctcaagacgctgccgcagattatcgcctccatcctcggactgatcctgatgtgcgccctgatggcccttgccctgacccacattctgcagatggactttatgaccgcctatctggccaccagccccggcgggctggacacggtggcgattatcgccgccggcacccgggcggatatgtcgtttattatggcgctacagacgctgcggctgtttaccattttgctgaccggcccggcgatggcgcgggctatctcccgctatgcgccgcggcaataaaaagccctcgcagagcgagggctgggcagatcgaatgtccgcgagcgcgatgcgcccgggcaatctgttatcaggctttcagggcggccagcgcggcgtcgtagtccggctcttcggtgatttcgttcaccagctggctgtagacgacctgatcgttttcatcgattacgaccaccgcacgcgcagccaggccagccagcggaccggtggcgatggcgacgccgtagtcagcgaggaaggacgcgccgcgcagcgtggacagggtgaccacattgctcaggccttccgcgccgcagaagcgggactgggcgaacggcaggtcagcggaaatgcacagcactacggtgttgtccagttcagcggccagctggttgaatttacgcactgatgcggcacacacgccggtatcaatgctcgggaaaatattcagtactttacgtttgccggcgtactggctcagcgcgacgtcagagagatctttggcgaccagcgtaaacggctgcgctttagcgcctgcggaatggtgccctgaacagaaacggggttgccctggaaatgcacggtttgtgacatggttatcttcctgtttacatatagttaacgtcgcgagtagtgtatgacatccgccagctacacggcaaaccctatttaacatttaccagagaggacaagggaatgcgtaacgtgcgagtgtatgaggaagcctggccgctccataccccttttgtgatcgcccgcggtagccgcagcgaggcaaaagtggtggtagtggaactggaagaggacggcgtgaaaggggtaggcgaatgcacaccctatccccgctatggcgagagcatcgcctcggtcatggcccaggtgatggcgatcggcgagcaactggaggcggggcttacccgcgaacagctgcagcggctgctgccggcaggcgccgcccgcaatgccattgactgcgcgctatgggatctgcaggcccggcgcgaaggcaaaaccttggcccagctgttgggcgtggcgttgcctaaccgggtgattaccgcccagacggtggtcattggcacgccggatcagatggcggccagcgccgcggcgctgtggcaggcaggggcccagctgttgaaggtgaagctcgacgatcgactgatcagcgagcggctaatcgctatccgccaggcggcgccggaggctacgctgattgttgacgccaatgagtcctggcacagcgaggggctggcggcgcgctgtcagctgctggcggacctcggtgtggcgatgcttgagcagccgctccccgccgacgacgactcggcgctggaaaacttcgttcatccgctgccgatttgcgccgacgagagctgccacacccgggagagcctgccgcggctgcgcgggcgctatgagatgatcaatatcaaactggataaaacgggcggcctgaccgaagcgctggctctggccggggaggcggaacggcagggatttgaacggatgctgggctgtatgctttgcacctcgcgcgggatcgccgccgcgctccctctggcgccgctggcgcgcttcgctgacctcgacggcccgacatggctggcggtggacgttgagccggcgctgcggttcagcaccggcgtgcttcatctttaagcctgccagcgcagcagatcggtcatcgccggcaggtaacgctccgttgcctcgtctgcggagaccggcggaaactcggcggtgatgcaggggagtccgatatcggcgcaccagctgccaaaggagcccggcgtgtcgtagcccacgctgcccaccagcggcagggagaaggcgtcggccagccagcgacccagcgggctgtggcccggatcttcgatgcaggccagcggatcgtgaaaggagaccacccacgccggatgaatctgatggatcaactgacacagggcctcggtctcccgttccgaacccggctgctcgccggtcaacagcaccacgtcgcgctccgccgccgcgctattccagcggtaaaccgtttccccttgcttccagttggctgctggaaagttacggttgaggtcaacgccgcgggcattggcgcgcagcccgagctgacagccgtcaggattgaccgtcagcaccacgtggtggcggcgcagctcgggtttcagggtgcgcagggcgcaggagagggtcacaatcgacgaattctcatcaccgtgggtaccggcaataatcagcccgctacggctgtctgcctgcggcgcaggaaaccacagcagcggcgcgcccagttccgagctgccatactgccgggttcccggcggaaagtcgccgcgctgcgggcgaggacgtgaaatagacatagggcttcctgtgtgtcgttattatttagtgttggcgaaaagcgtatcgggatcaaacccattccctgaggcgtgaaatccgacggcacatcaattttctatcatatgtcgtttgcaatttcaggtgatgaaacaaataattatcgctctgttggcggtatttttttcattttaaaggggatcttatgaagtatcctgtcgctttgacatgcggcgcgctgtggttagccagcgtatcttctctggcctgggcggctgacgtaccgccgggcacggtactggcggaaaaacagctgttagtgcgccatatcaaagatgaacccgcctcgttagatcccgccaaagcggtgggcctgccggaaatccaggtgatccgcgatctgtttgaaggtttagtcaatcaggatgcgaaaggcaacctggttccaggcgtagcgacccgctggcagagcaacgataaccgcgtctggacctttaccctgcgtgataacgcccgctggtccgacggcacgccggttaccgccgaagatttcgtctatagctggcagcgtctggtggatccgaaaaccacttcgccgttcgcctggttcgcggcgctggcggggatcgctaacgcgcagaacattattgacggcaaagccgcgccggaaaccctgggagtcaccgccgtcgacgcccacaccctgcgggtgcagctggataaaccactgccgtggttcagcaacctgaccgccagctttgccttctatccggtgcaaaaggcgaatgtcgacagcggggcgaactggacgcggcccggcagcctggtgggcaacggcgcctatgttctgaaagaccgtgtggtcaatgagaagctggtggtggtgccgaacacgcactactgggataacgccaaaacggtgatccagcaggtcacctttgtgccgattaaccaggagtccgccgccaccaagcgctatcttgcaggggatatcgatatcaccgagtctttcccgaaaaatatgtaccagaaactgctgaaggatattccggggcaggtgtataccccgccgcagctgggtacctactattacgctttcaatacccaaaaggggccgacggcggatgagcgggtacgcctggcgctgagcatgaccatcgatcgccgggtgatggcggagaaagtattggggaccggggaaaaaccggcctggcgcttcacgccggacgtgacggcgggcttcaccccccagccgtcacagtttgagagcatgagtcaggctgagcttaatgcccaggcgaaagccctgctggctgccgctggctatggcccgaatcgtccgctgaagctgacgctgctgtataacacctctgagaaccaccagaaaattgccatcgcggtggcgtcgatgtggaagaaaaacctcggcgtggaagtgaagctgcagaaccaggagtggaaaacctatatcgacagccgtaacaccggcaatttcgacgtgatccgcgcttcgtgggtaggggactacaacgagccgtccaccttcctgtcgctgctgacctccacccacagcggaaatatctcgcgctttaacgatccggcgtacgacaaaatcctcgcccaggcggcggtagagaattcggccaaagcgcgtaacgacgattacaacgcggcggaaaagatcattatggtcaaagcgccgatcgcgccgatctaccagtacactaacggccgattgattaagccgtggctgaaaggctacccgatcaccaacccggaagatgtggcctacagccgtaccatgtatatcgtgaagcactaaccggtactggttgcctgatgatgccaggcaaccatcgctgatccccgagctggcgcgtcttgccgcgccagtttttcctgctctccttctcgcgccacagtagaaagtctcacttttctggcagtatggccgactgatgccaggttctaccatctggtcgcgaagcatcagaagatctcatccgccgggtttttatcatgatgctcaacgtattcggcaaccatgccatccggatgccgaaccagcatgttccagccggtgggcacggccttcaccgggttgataatcgttgccccggtggaaggcagatgtttctcccaggcggtaatgtcgttgaccaggaaagtggcctcggtggcgcgaaacggagccaggctttgctcggttccgccaattaaaagcacggaacccacctgcgccagtttgagatcgtattcgggatagtcgaaacgcaaccttgccttctgcgcgatgagattttcgtagaacgaaacggtatcttcaaagcgggcaatcagcacgcatcgacggatcaggatattgaggactttcattatatctccttcgccattttctcagagatagcgtagcagcactgaggtggaatgtaaggctcaagtagcagaagagcgtgacgtatagttgtggcctgcgtataagaagatatcggcaatgaccttgtgcgctggataagaaaagttgcagttaaaaaatatttattttgtaatgatgctgtggtgtgattgctgagcatacgattagcgggatgattaagaggggctagatggaaagtttaatttcttcgatatggaattttgatggactgataaatagcgcgttaatttttgttacttttggtttattaggagtatttatctggaaacgggcaggatccgcatattctttattgaaccggctatgggagttctgcctgggagggaaaacgtttcacgacggtaaaataaatgcatatttcaatgagagaaatgatgttgaacgttttaatgttttatttaatgtcggcgcaagaaataaagaagagatcaagtcactgattaactggacgaaaaagaaaaatatagatattcgtcatgtcacagccgcgaaaggatggtttgaaatatcaacgcttaaggcaataaaaccattatttatcgctaatgttggtgtatttgtctcttgtgtgttaactatgctgctattatcaaattttatgttgctggcattgaagccatccgcactagtacgattaggcgacgacaagtcatgggtttggattaatgatcatattgctgagagttcgatctggaccaataattaccttcccctgaactggactgagtggaagctcgataaaaaacagtgtgaaagtgaagatttcgataaaacggttttctcagaaaaagcggggataagtgtgcgctcggttgacaggatttgtgagaacttttcaagtggttcgttgagtgatactataaataatattattaaaaatcaaaaactggcatgggttttggctatttaccccttcatctttacgattatttgcttttttagcttgttacgcagaggtgctgcttctaaactttataatgaagtacataactcacaaaattaatatttatataaattcatttccgtctggcattactgtttgcatcgatcggaattaaatgacaggtccgagtacagaagctgtcaccggccactaccggttgcctgctgcctgcaggcaacctcagctacattcgcaatgtatcaatgaccgctctcagcgcgggcgacacattgcggtgcgggtaatagagaaatgaaccttccagacgctggctataacgctggagcacccggataagtgtgccctgggctagatcgtcggtaatcagctcttccgggacataggccagccccagaccgagcctcgccgctttggcctccatatagctatcggcgaaagcccactgtccctgaggtgggtgggtgatttttttgccatccacattaagttcccaggcgtaaaggctgccgtcgccgaactgataagcgatgcaggggtgggcgactaaatcggcgggcgtttgtggaaagccgtagcggcgaaaatgttccggggtacccaccaccgccatctccatatcgggcgaaatgcgtaccgcaatcatgccactcccgacttccgggcccagacgcacgcccgcatcgaatcgctgcgcaataatatcgacaaaccggctttcgctgatcagttccagtctgatatcgggatagcggtgtttaaatactgccagcttcggcagcaggactttatcaatggcatgctggctggcattgatgcgtaccgtaccggagggcgtttgacgatagtgggccagcgtggcgagtcccatatctaaggcgtcgaaaccggattcgacattgtgatagagctgctcacccgcctgagtgagcgacaatcggcgggtggtgcgcaccagaagctgaacgcccagccgctcttcaagttcacgaaccgcacggcttacaccggactgcgccaggccaagtcgttgcgctgcggcggtaaaactgccttcccgcaccacctgcataaacagatagaggtcattatagttttcccgtttcgccattctcccgcctcgtcatccgcatgccatttagaacaatatggtattaatcttagcatttttcgccccctaataagaaccattactgctggctacactaagcgcacgacaataaagcaaagctgcattgtctactggagacttgcattgatcacgtttatttaggggaattttgatgacggttttcaccaaaaaactgacagccgcgatacccgccatgctgctttgcgcctcattaactggagtgacaacgatgagctctgctgagacaactaacccgaatgcgcctgtttcactgattgaacaatgggataaaacgtttgctgagagttcgaaagtggatcaccgtaaggtgaccttccagaaccgctacgggataaccttagttggcgatctctacctgccgaaggatcgcggtgaacgcgaactggcagctgttgccgtgagcggtcccttcggcgcggtaaaagagcagtccagcggcctgtatgcccagacgctggccgaacaggggtttgtcaccctggcgtttgacccatcctatacgggcgaaagcggtggctacccacgcaacgtagcctcaccggatatcaataccgaggatttcagtgccgcggtggactttctgggcctgcaaaaagaggtggatcgcaaccgtatcggtttgctcggcatttgcggctggggcggtatggccctgaacgacgcggcgatggacacccgcgtcaaagcggtggcgaccagcgtcatgtatgacatgagccgcgcgatggggcatggggtaggcgatggcaaagaccgctacacgacagccgaccgccgagcggtactgcagtacttgaacgcgcagcgctggaaggatgcggcaaacggcacttccgcccccggtgggcatgacatatatgttgatgataaaggcaacgtcagcgctgccgatcgtattttgccggaaaccttgcccgccaaccccaacccggtcctgaaagagttcttcgattattaccgtatgccgcgaggtttccatgcgcgttcggttaattcaaccggggcatggaatgcgacgatgccgctgtcgtttatgaatatgccgctgctgagttacgccagtgaagtgactattccgacgcttattgtgaccggcgaacaagcccattcacgctattttgccgaagatgcctttaaggccatcggcagtaaagagaaagcgctggtgattgtcccaggcgcaaaccacgtcgatctctatgacaacgtcgcgggcaaaattccctttgcgacgttcgcgcaattttttaaaaccaacctgaaatagatctcctgtgccggagacatccccaaagccgccacgcgcctgcgggcggctttgtcttgtcggagagaaataatgtctgcattaggtcacacccgggcacactggagcggcgtcctggcgatgacgctctgcgtatttgtgctcattgcctcagaatttatgccggtcagtctgttgacacccatcgcgggtgatttacacattaccaagggattagccggtcagggcattgcgctttctggcgcgctggcggtactgaccagcctgacgatatcccgtcttaccggatcgctggaccgtaaatggctgctgctggggctcacggcgttgatggcagcctctggggtgattattgccctggcgtccagtttcccggtttatatgctgggcagagcgctcattgggatcgtcatcggcggcttctggtcgatgtcggcggcaacggccattcggctggtgccgcaacgccaggtcccccgcacactggccatctttaacggcggcaacgcgctggccaccgttgtggcagcgccgctgggcagctacctgggggccaccgtcggctggtgcggcgcctttttatgtcttgtcccgctggcggtgctggccttcgtctggcaatgcattagcctgccgtcgatgaaaagtccgcgcgcaccacagcggcagggatcggtgctgcgtctgttccgtctttctacgctatccctgggattgctggcctgcggactgttctttatgggacagtttaccttatttacctatgtgcgaccgtttctggagacggtgacccaagtcagtccttctggtctgtccctgatattgctgacaatgggtatcgccggttttatcggcacgctgcttattacgaccgttctgaatgcccgattttatccgacgctggtggctatcccgttgttaatggccgcaattgccggaacgcttctgctggccggacaccacacgggatcggtcgccgtactgttaagcctgtgggggctgctggcgacggcggcgcccaccggctggtggacatggattgcgcggacgctgcccgaggatgcggagacgggcggcgggctgatggtcgccgtgatccagctatcgatatccctcgggtcaacggtaggcggcctggtgtttgatagtctgggatggcacagcacttttgcactgagcggtctgttactgctgggcgcggcaggggtgacttttctgctctctgtcaaaatcagatcatctcagcgcactgcgattaatgaattgaatgcataagtcaaatcaggaatgacaggctaatcgtgaccgcgttcctgtcttaccatggtgttttaacaagaggggagcttcaccgtggaatattcaatattaagtaacgctcgcaaaatgccgatgctgggtttcggcgttttcaaggtgaccgataaagcggagtgtaagcaggcggtgttgaacgccattcgcaccggttatcgcctcatcgataccgctgccgtctacgataatgaagatgcggtgggtgaggccgtgcgcgaagccatcgccgaaggtctgtgtacccgcgaggcgctgtttattacctccaaactgtgggtccaggacatggccaacaccgggatggcgaaagccgggattgccgcgtcattaaaaaaatcgggcctggaatactttgatctttatttgctacatcaggcgatgggcgattatttcagcgcctggcgtgcgctggaagaggcctatgaggccggtaccctgaaagcgatcggcgtctccaatttttacccccatgtgttagctaacttctgcgaaactgtcagaattaaaccaatggtgaaccaggttgaactgcatccttatttcgcgcagcccgcggcgctggaagccatgaagcattatcacgttcagcctgaagcgtgggcgccgttaggcggtggcagacataatccgtatcaagatgcattgcttcgggggatcgccgatgcgcaccagaaaaccattgcgcaggttgttctgcgctggaacgtgcagcgtggcgtcacggtgatccctaaatccacccgccaggagcgcattgaagaaaattttgctatctgggatttcgtattaacagataacgaaatggcgcaaatcagcgccctggatttaggctatgttggcgaagcggtaaaacacttcaaccctgagttcgttcgcggatgtctgggggtgaaaatccacgactgattgcggcatcggctgattcgatatccatctcctcgcctgcgctgcggcgacgggttcagtatgctggttagcgcccacgcgtttgccgcgatggttgtcaatgcggtagtcgatcgtcacgggcagctgactggtgacagttgatcctctggccggtgacatgtcggttggatgcttccgtcgcagtggcctttaaagcggcagtctcccgggaaattttcgctgccaatgaccgcgtgacactgcgctttatcgatgcgggagagatctttcctgccgaacgcctggcgctggcgcgtaacgatgagcactttgatgtcgatccgttagcggaaggcggcagaggcttgcggcttattctgcgtgcggtggactattttaatgtggaaactggcgccggggagaatgtgactaccctgatagaagcgttgcctgatacccgcctaagccatgccaccgacgatcgctgcgggtgagggaacagacgttgcccccgggtgaatcaccgggggaatttccccacccgcgttcaccggcttcatcatcttattgctgtgcctgggcagcggagtgcacgccaaggtgatgaggacggatggtatctaatgtcatcatggctgatttgcagaaaatgcatttcgcaccaaaagggtttttttcagtgacgtcaaactgggacgttctgtactgggagccatggcagcatgggcatctaaaatggatatgttcgatcataatgtaaaccttgtatgggtgatgttctgttgaaaagacaatggtcgtttcaggaaaattaacgcggctgattttagttggtggtaagccgggttttgtgtcagatggcggactttttaaggagccgacaaggatctgacagggcctgtttacagaaaaagcaaactactaacgggactgctcaaaggaaggtggtatcagggataacgcctggagatgagaacacgtactcagataataactttttgtctggtaaatcgactcaacgattaacgcacgtgccgtgaataatagcaaacgttattttagccttccggatgcctgctgcgccaggggaggcttcatcagcgccgtcacccagtcgataaatacctgtacccgggcagagagctgccgattactgggatagagcagggagagcggcagcggcgcaggacgaaaatcggccagcacttccgttaacgcgcccgacgccagatcggcctcaaggcggggcaagggcgcctgatacaggccaaagccaagccttgccgcttcggcgccgacgtcggcatcggaagtcagcagccgacagggcaaactgacctcgctctgacggccatcctgggtaaagctcagcggcaaggtacgttgcgtgcgcgatgaaacaaacccgatcatcacgtggcccgtcagtccttcaatcgtatgcggggtgccgtaccgggcgagataggtcgggctggcgcaggtgatctcctgcaacccggcgagcggccggcagatcatctcgctgtcggggagatggccgccgcgaatgacgcagtcgactccctcgcgaaccagatcgacgtcacgctcgctttcgccgatctgcagcgtaatgtccgggtagcgggcgagaaactgcggcagcgcgggcagcagcagggtccgcgccaggttgcccgccacgtctacccgaatggtgccggagatgctccccccggcgctgcggttggcctcctcaagggccgccagaatggacacgcagcgctgataatacagcgagccttctgccgtcggccgtacgtgccgggtggtacgatgtagcagccgcgccccgagactgacctccaacgctttaatagccgcggtcgctactggccgggaaacccccagatccgcggcggcggcactgaatgagccccgttcgacgatgcgcacaaacaaggtcagagtatccagtttatccatgacattgttccagctggcaaaactatcctgtcgcccaacgcggtcttatcgtcggcattcaggggcttataatcgctcatgttttcagcagagagaaaaggagaaaacatgaacaatagcgcaaaaatcgccctggtgacaggtgacaggtggcagccgcggcctgggacgcgcgaccgtcgaagcgctggcacagcgcggcgtaaatgtagtactgacctacaaaacgcgtcttgccgaggcgaacgaggtggttacacgggttgaagcactgggcgcccgggcgatcgcgttgcctttcagcgccggcgaaatcgacacctttgacgcatttgttagcgcttttcagggcgcgctgacggagctgggcgccgataaatttgattatctggtcaataatgccggcaacgccagcggcatgggatttcttaacgccacggaagcggaattcgatgcgctgtatcgcatccacgtgaagagcgtttttttcctcagccaaaaactattgccgctgctggccgatggcgggcgaatagtgaatgtttcgtccggcctcacccgcatcgtgatggcgaaccgggcgccctatgcgatcatgaaatccgcggtggaaaccctgactcgctatatggcgtttgagctgggcagtcgcgggatcacggtgaactgcgtggcgcccggcgccatcgccaccgatttcagcggcggggtggtgcgggataacccgcaggtcgctcaggcggtggcgaatatgacggcgctgggccgacctggcctgccagaggatatcgggccgatgatcgcctcgctgttatccgatgatcatcgctgggtgaatgcccagcgcattgaggtttccgggggaatgcgcatctgagcgaagaaaaccggggctgttttcatccgtagtcaatcgatatgtcagtggatgccgatatagcgcgacgctgtggagagataaggaaataatgatctgccgcgttgctcgttaaatattagtgattgaccttattgcctgaatgcgcaagattattgttgaataaacagtcaatatgctaaatatatttaatgcacgtatgaaaggatttaagatatggattttgaaaatgaattgaccagtaagatccttgatcccattcacggcactattcgtttgacgacactcgagattgcctttatcaatcaccccctgttccagcgcttacgcaacattaaacagaactcttttttatataaggtgtttccctctgcggtgcacagccgcttcgaacactctcttggcgtactgcatttatcaagtgaaatactcaataatttacgcctgaatgcgatacggtatcaaaagaaatatgatgatggccatgtgtttggtcatatcgatcagataccaaaacacaacattcaggagttgagactcgctgccctgatgcatgacatcgggcatgggcctgtatcccaccagtttgagagttttatgcctggtaagcacgaattctccgatgttctccccacagcctaccattcgatcattgatgtattaagcaagccagaacagaaagttgaacatgaacagctttcgctgttgttcagcctgatgatttatcatgatctgagaaaacaaggtaaggtcgatgacgaaataaatatcgaaaatgtgttaaaaattatcgaaaaaagatacggtgaccaacagatcattgaggaaattaatggaaaggcaacagatatcctgccgttaatgacctcgatcatctcttcctgtccgatcgatgccgaccggatggattacttgctcagagatggctatttctccggcgtcaagtgtggcatctacgattacaatcgcttgtttatgtcaattgtcccggtcgaggaacagggaaaattgtaccttgcttacaaagagagtgggattgattcgatcgctgagtttattggggcgcgctccagccttttttcgcaggtatattaccataaaacaaaccgcgcctttgcgacgatgttgagcacattatgtgagattatgcaaagcaaggatccacaaaatgtcattatcgctgacgttaccgaccgtatcgttgaccatagcgatgaaagcttcatcgacgcgctgaaggagttttatttgtcgtgcagtgatgattattttttgaatgacaaggttggtgaatggatagatatcagcgataccgaggcggttaataaaaaaatacttcatgacattattaaccgacacccatggtcgaaggtctatgaggccaaacactctgtgtataaagctaacatcgttgacaaggaaaataaggcgtggaagagtcaactcaccgggttattgacttctgtattacagcctcatttcaaaccacatgaatttgccgttgatattgtctccgactgcgcctttaaagacctggataaaaccgaagttaagcttttggtgaaagatcttaagaaccgctacgaaataaaaccgttaattgaatgtggtgataagttaaatcagtatcaaatcatcaaatattgcattcgggtatttgttgaccgcgatatcaaagaacgcgtaactcctgaaataacctataaaatcaatgacatagtggtcaagcagatcgcgttgctgaattgatgatgcccgtcagggcagcgataaatctttcaggggctggttttttaaccggcccctgaagataagcggtaaatcgtggcgcatccccgccatcggtataacatacaacagcgcgtttacccgagactaaacaccgcgctgaggcatagattcccgcaggggagcgggtggctcaataaaaacgccggctcagtatggttattccgccagcagggcggcgaatttcgccagccactgtggatgagcaggccaggcgggggcggtaaccaggttaccgtccacatgcgcctggtcgataccaatatccgcatagtgcccaccgctcaggcgcacttccggagcgcaggcgggataggcgctgcaggtccgtccctgcagaataccggcggcggccagcagctgtgggccatggcagacggcggcgataggtttacgcgcggcgtcgaatgcctgtaccagtttaataacctcctcgttcaggcgcagatactccggcgcccggccgccggggatcactagcgcatcgtagttctcggcctttactgcggcgaagtcagcgttcagcgtgaagcgatggcccggcttttcgctataagtctgggcgccgtcaaagtcatggattgcggtcatgacatagtcgccagcggctttatccgggcagacggcatcgacctggtggccaatcatctgcagtgcctgaaaaggaaccatcgtttcgtaatcttcggcataatcgccgaccagcattaggattttcttgctcatctttgtgtctcgttgtgggcgaaaggtgtcttagatatagcctggcgacttgcagaatgcgaaccgttcaggatgccgacgacggtgtcgtgtgcgtcttgtaaccgggctcatgtttttttgctaacgacaactttgttcgatatcgcgctgtggctcgttatccgcaaaaaatcggtttgtggggagtaaggggagcagaagaatattgttaccgtttagatttcgcgccagcactattaagcgttcgccgcgaaggggcaatcggatggaagccagatattttccctctgagtaattgattgcgttgttacgctaaatttgcataatgagcgaattatattgccccggtcgtctctatggtttcctttattcatccgcttaatgttttagcccgccttatagtatccattgcaaacattcctttggtgcattatttattgaatttatcattgactgttgtttcacattttaaatattgatattcatggtgcttttattttcgtggtgaaagtgggtgtttatgaataaatataattattaggtggttaagttgatcggtaatccatttttgctttatcatcgtcacgtttcacatcaatatatcttcaataattattccttaaggaaaggaactgctatggctgatacgttccagaatgaagtccccagggcgcgcattaatctcaaattatctcttcataccggcggcgcgcaaaagaaggtcgaactgccgctgaagctgcttaccattggcgattttagtcatgggaaggaaaaccggcctttatcggaaagagaaaaaatcaacgtcaataaaaataattttaacagcgtactttcggaatttagcccggaagttaacctctcggtgccgaatacgctggccggcaatggcgaagaggagaacgtcagactgcgttttaccgacatcaaagattttgaaccggagcaggttgcccggcaaattccgcagctccgcgccatgctggcgatgcgtaatttattacgcgatctcaaatccaatctgctcgataacgccactttcagaaaagagcttgaggcaatcctgaaagatccggcgctgtcccaggaattacgcgacgaaatgagtgcgcttgccccgaaataagtgcggggcaagtctgttaatggattaaccgggaaaatgctaatgtctgttaccacagaaaacgcccctgttcaggggcaaaccacgctgcaggaaaacagcgcgggcgagggcgtttacgcctcgctgtttgaaaaaattaatctcaccccggcgtcttgcctcggggatatcaacgactttctggacgatgccgcgctctccgaggcgccggcggcggagcgtctcaccgcggcgatgcaggtgtttatggaacgcatccgtcagtccggccagcgggtggaaaagctcgacaaaacgctgatcgaccaccatatcgccgagctggatttccagataagccgtcagctggacgcggtgatgcaccatcaggagtttcagcaggtcgaatccctgtggcgcggcctcaaacagctggtggacaacaccgactatcggcagaacgtcaaaacggagatcctcgacgtcgccaaagacgatctgcgccaggactttgaggacgcgccggagcttatccagagcggcctgtactggcacacctataccgcggagtatgacactcccggcggcgagccgatcggctcggtgatctcggcctatgagttcgacgccagcccgcaggatgtggcgctgctgcgcaatatctcccgcgtctctgcggccgcccatatgccgtttatcggcgccgtcggcccggccttcttcctgaaagagaccatggaagaggtggctgccattaaggatatcggcaactacttcgatcgtgcggaatatatccgctggaaggcgtttcgcgaaactgacgatgcccgctacatcggcctggtgatgccgcgcgtgctgggtcgtctgccgtacggtccggacaccgtgccggtgcgcagcttcaactatgtcgagcaggtgaagggcccggatcacgaaaaatatctctggaccagcgcggcgttctccttcgcatctaatatggtgaagagctttgttaacaacggctggtgcgtgcaaattcgcggtccgcaggcgggcggcgcggtgaaagatttgcctatccatctgtacgatctgggcaccggcaaccaggtgaagatcccttccgaggtgatgatcccggaaacgcgggagtttgagttcgccagcctgggctttatcccgctgtcgtactacaaaaatcgcgattacgcctgcttcttctcggccaactccgcgcagaaaccggcgctgtacgataccgccgacgccaccgccaacagccgtatcaacgcgcgtctgccttacatcttcctgctgtcgcgcatcgcgcactacctgaagatgatccagcgcgaaaatatcggcaccaccaaggaccggcgtctgctggagctggagctgaacacctgggtgcggagcctggtgaccgaaatgaccgaccccggcgacgagctgcaggcctcccatccgctgcgcgatgccagcgtggtggtggaagatatcgaggataacccgggcttcttccgcgtgaagctgtacgcggtgccgcacttccaggtcgaggggatggacgtcaatctgtcgctggttagccagatgccaaaggcgaaggcgtaggttcggacgatgatgaaaacggaacgtccgttgtggggccggggcattatggtgtcgcctcagcattttcaacagcaggctgcgtatgcagcctggactgcggaagtgattgcccggatgggtcttaaccacccctggggagtggttgaggcgaccttcgaaccagagatgctcaaactgggccgcctgcaggctcacaggctgcaggtccggttccaggatggcacgatgattgatacggacaatgccgatgcgctgccgtccgcgctgtcgctggacggcgcgtccggcgaggcggtgatcgtgctggcgctgcccctgatgcaggcgaatggcggcaactgtctgaagccggaggaggtggccgaaaggccggtgcgcttccggcagcgctggcgcgatgtccgtaaccagtttggggatgatacccggcagattgccgtcatacagccggagctgatcctccgcttcgcccaccaggacaacagcgattacctgacctgtccgcttgttcgcctgcagcgggactcgcagggggcctggcttatcgacgagacgtttctcccgccgctgctgcagatccagggcagccgctggctggcgaggcagcttgaacagctgctcgtccagctccgggctcgtctgacgcgcctgatggccatgcgtcgcgaaagcaatgaacggatggctgattttgccgtagccgatgtctctctgttctggttgctgaatgcgctgaacagcgccgagccggtgctggggtactttctgcgttaccggcaaagcccgccggaacgcctctacccggagctggcgcgcctggctggtagcctgctgaccttttcgctcacccatcaggcgaatgccgtcccgatctatcagcatgaccagttgaacgcggtttttccgccgctgtttgatttactgagcgacctgctggaggcgagcctgccatcgcgggtggtggcgattgcgctggagcatgatgtccggctgcacttctggcaggcgcgtctgcacgatgcccggctgcgggaaggggctgattactacctgtcggttcgttcgtcggtaccggtcgcccaactgcaggagcagtttccgcgccagtgcaaagtgggcagtccggatcatgtcaaagccatcgtcaactcctcgcggacaggggtgcccctcacgccattgcgtcatgtgccggcggcgatcccgctacgtctggaaaatcagtatttcagcctcgatgtgtcccaccctctggcgacggaaatgctgcagagcggcacctgtatgttttacgtcccggggatgctgggtgagcctgaacttgaactttttgcggtactacgaacgtgaatgagcctaaacgcggcaacgccgcgtccattgatattgatgcgctgctgcagaacacctggctgcaggttatcagcctgcgccacggcccgcagttccgcgatgaggaagggtacacgctatggcagcgctgtattgctgatgtcgagcgcgtgcaacatgagctgaaggcgagcgggcttgatgacgccagctgtcagcatattctcaccgcccagtgcgcgctgctcgatgaagccgtgaaagggcgcggcgtggaggatgaggcctgcctgcagtggtatgacattccgctgcaggggcacttcctcggcaccatggacgccggcgacaccctgtgcgagcggatgcgtgatgtgttgcgtgaaccggcgcccaacctggccgtggtcacctgttttcagcgggtgatgctgctgggttttattggcagctttcgctccctccacgaccccgagcgcctgaagctggtcaacgcgctcggtgagcgtgttcctccttttcagtgcccggctaccgctcccgtactggtagagagtcgcgccggtctggggataagcggctggttggccccatggccggtacgtattggcctgagcgtggtggtggtactcgccctgtggtggggactcaaccactggctcgatcacctgctgctgaccttgttaccgggggaggtgaaatgagccccgcgcagcagcgtgggctggcgctgtgggccagtctgctgagtgcgctggtgtgcctgctatttttgccggttccccgctggggggcgtggctcattctgctggtcacgctggccctgatcatcgggatctggcgcatcgccagtcgtcgtaccggacgtaacgtcgcatcaaccctggcccctctcccggagggcgcttatcgccagccggtggtcctcgtttgcggcgacctgccgtgtgtctggccgccagcgtcaccggtgcgagtcgtcaaacagggctgctggatccgcgtggaaaagacggaggagctgcagcaggtcgcgcgccaggtattgagccagcggccggaatgggggcctcagctgtcggtgctgctctgcgtctgcccgcagcggcatgcgcaaagcgatgcgctgaccagcgctctgctggccctgcgctggcaactcagccagctgcgccagcagacggggtatgccgtaccgctggcgctgcaggggcaggtgggcagcgcgatgagtcgcgacctgttgtggcaggcggcgataccgggtgaagcggtgaaagtctggcagccctcctgcgccccctgttccgtaccggcctgggtaagcgccggcggggcggccgcgctggagcagcaggtgctgatgaacagcctgatgggctggtttgaacagcacgtccatgccgtgttgacggaagagaatatcgacctgccgcctctgaccccagcggccgtgctgtggggcctcgggccctcgctgcctggaagtctggcgtcgtcggcctggacgacgtggttatcccgacatagcggcctgtcgcgggtagctggctggcagccagatgagagcgacaccggggacgcttcagctttgccggaattcatcctgccgcagttaccggcgggacggggactcacgccacgaggcagggcctggcgcgcggcgctcgcgattttcaccctcgcggctgtcgccgcgctgctcagcagtggctggaacaatcgacaactgctgcagcgcgtgggcgtcgatattgcgcgttatgagcggattgcgatggatgattatcgaccaaaagccagcgctgtcagggtgctgcgtgaagatgccgcgctgcttgatagctgggcgcgtaacggcgtcccgctgcgcctgagtctgggcttgtatcgcggggagcagattcgcctgccgttgctggaggcgattcgcggttacgtgccgcctccgcctccgcccaggccggtgcagcgcgttgccccgaacgtcatccgccttgacagcatgtcgctattcgataccgggaaatgggtactgaagcctggttcgacaaagcggctggtcaactcgctgatggacattaaggccaggcccgggtggctgatcgtggtggcgggtcacaccgacagcgtgggtgaggaaaaagccaaccagctattgtcgctgaaacgtgcggaatcggtccgcgactggatgcgcgataccggcgacgtgccggacagctgctttgccgttcagggctatggcgaaagccgaccaattgcaacaaacgatacgccggaaggccgtgcgctgaaccgtcgtgtcgaaatcagtctggtgccgcaggtagacgcctgccggttaccggaccaaccctctgcgtcatcccaggatgatggcgcttcactacacaatggagagtaattccatggcaattcctgtttatctttggctgaaagacgacggcggcgcggacattaaagggtctgtcgacgttcaggatcgtgaaggcagtatcgaagtggtggctcaggagcataacctgtacatcccgaccgataacaacaccggcaaactgaccggcacgcgtattcatacgccgttcctgttcaccaaggagatcgactcctccagcccctacctgtacaaggcggtgaccaccggtcagaccctgaagtccgccgagtttaagtggtaccgaatcaacgatgccggccaggaagtggagtatttcaataccaaacttgagaacgtcaaggtggtaaaagtgaatcccctgatgcacgacatcaaaaaccccgcctacgagaagcacaaccatctggaacagattgagctgcgctacgagaagatcacctggacctataaagacggcaacatcattcactccgatagctggaacgaacgcgccaccgcgtaattgcccgtcatatttcgcgccgctggcgcgcaggcgacgttcgctcatcccggccgcatcgttatctctgcggccggggattattgcgggcgatcgcctgatgcgggcagcgtttctctgcccgccgttttttgctgagcgcctgagatacgggttctcagcaaagaaaaacacaatctgtctgcctgaccttgtgcgcttggggttcctgttcgggaacagcgacgggcggtagcgtgtccggaaacaataagagaggatctcatggaaaatccagccagcctgttacgccgtcttaatccctgctgtgcccgcgcaatggagggggcggcctccctgtgccagacccgggcgcatgccgagatcctgcccgagcactggctgctcaagctgctggaacagggggaaggcgatctgacggtgctggcgcggcgctatgaatgggatatggatgctctgtggcaggatctgctgagctggctggataaacagccgcgctcggtacgtcatcgtccccagctctctgaccataccctgaggctgatgcaggaggcctggctgattgcctctctcagcggcgaagcgcagatccgcagtgttcacctgctgatggcgctggttgaaaaacagaatctgatccagtgcgatggcctgtggccgctgttaacgctgggccagcgtcagctggaacgcctgcgctccttgctggatgcccagtccgacgaacgtccgccagcgcagcaggaagcggcgctggcgcagccccatggcggggacgtggaatttgtggggcgtcctgcgggcagcgaactgaatgcggatgggctcaacccggcgctgcagaacgcgctggacaaattcactctcgacgtcaccgccaaagccagagacggccagattgacccggtgttcggacgcgacacggaaatccgccagatggtggatattctctcccgtcggcgaaaaaacaacccaatcctcgtcggtgagccgggcgtgggcaagaccgctctggtggaaggcctggcgctgcgcattgccgaaggcaacgtccccgacgcgctgaagccagtgtcggtgcgcacccttgacctcggtctgctgcaggccggcgccggggtcaaaggcgagttcgagcagcggctgaaaaatatcattgaggcggtacagcagtcgccttcgccggtgctactgtttatcgacgaggcgcacacgatcatcggcgcgggtaatcaggcgggcggcgcggatgccgccaacctgctgaagccggcgctggcccggggcgaactgcggactatcgccgccaccacctggagtgaatacaagcagtacttcgagcgcgacgccgcgctggagcgccgctttcagatggtcaaggtggatgagccggacgacgacaccgcctgcctgatgctgcgcggcctgaagtcccgctatgccgaccaccacggcgtgcatatcacggatgatgcggtgcgcgccgccgtgacgctgtcacgacgctatctcaccggtcgccagctgccggacaaggcagtggatttactcgacaccgcttccgcccgcctgcgtatgagtttggataccgtgcctgagccgctgacccgcatgaaggcgcagctcaccgcgctggcaatggagaagcaggcgctgctggaagatattgcgctgggcaacagcgcccgcggcgatcggctggcggccattgagcaggaggagatccgccttattctggcgctggatacccttgaaactcagtatggtcaggagctgcagctgacggaagcgctgctcgcctgtcgccgcgatatctcccgccaggcggaaattagcgatctacaaaccgcgcttatcgccgtccagcagggcaatccgctgctcgggctggacgtcgacgtccgcaccgtggcgacggtgattgccgactggaccggcgtgccgctctcctcgctaatgaaagatgagcagacggagctgctgagtctggaagagagtctcggcaaacgggtggttggccaggaggcggccctgagcgctattgcccggcgcctgcgcgccgcgaaaaccggcctgacgccggagaacggtccgcaaggggtgttcctgctggtcgggccgagcggcaccggcaaaacggaaacggcgctcgccctggccgatgcgctgttcggcggcgagaaagcgctgatcaccatcaatctctccgagtaccaggagccgcacaccgtcagccagctgaagggttctccgcccggctacgtcggctacggccagggcgggatcctgaccgaggcggtgcgcaaacgcccctacagcgtggtgctgctcgatgaggtggaaaaggcccatcgcgatgtgatgaacctgttctaccaggtcttcgaccgggggggaatgcgcgacggcgaggggcgtgaaatcgactttcgcaacaccgtgatcctgatgaccgccaacctcggaagcgacctcctgatgcagttgctggatgaacagccggaggccagcgaatcagacctgcacgagctgctgcgcccggtactgcgcggccacttccagccggcgctgctggcccgcttccagacggtgatttaccgtccgctgccggcggcagcgctgcgcgccattgtcggcatgaagctcgggcaggtaagtcagcgtctggcttgccattacggaatcaccaccaccctcagcgagagcctgttcgacgcgctgaccgaggcctgcctgctgccggataccggcgcccgtaacgtcgacagtctgctcaatcagcagatcctgccggcactgagtcagcagctattgagccatatggcggcggggcagaaaccgcgccaggtgacgctggggtatcacgaagaggaaggcgtcgtgatggcgtttgacgaggggacaatatccgatgagtagcgttaaatcgttgttgttcagccataaccaccacctgctttcggtgaagggatgtgaagccgggcttgatgtgctggccttcgagggcgatgaagccctgagccagccgttccgctaccgtattgaattcaccagcgcagaccatgccatcagcaaagagatgatgctgatgaaggcagcctccctgacgctgcaggcgccggtggctcagggcttcggcatcaatgttcagcaacccgtgcgggtgatccagggcgtggtgacggggtttgaacggctcagtacctccagggatgaaacgcactacgcgctgacgcttcagccgcgcctggcgctgcttaaccgctcgcaccagaacgccatttaccaggaccagtccgttccgcagattgtggaaaaaatcctccgcgagcgccacggcctgcgcggtcaggattttctgttctcgctgacaaaaacgtatccgcgccgcgagcaggtgatgcagtacggcgaggatgacctgcgctttatcacccggctgctgggtgaggtggggatctggtttcgctttaccgccgacaagcggctgcacatcgacgtcgctgagttctgcgacagtcagcagggctatgagaaggggctgacgttgccttcggtcccgccgtcagggcagcagtcggccggggtggacgcggtgtgggagatggcatgccgccaccgcgtcgtggagcagcaggtcagtacccgcgactacaactaccgcgaggcgacggcggacatgaacgcgcaggtggatgtcactcgcggggagaccaccacctttggtgaggcttaccactggggagataactacctgaccgcggggaatgtccatgaccgccatccggcgccggagtccggggcgttttacgcccggcttcgccatgagcgttatctgaacggccagacccggatgcaggccaccaccagctgcccgacgctctgcccgggacaggtgctgaaggtcaccggcggagaggaggtggccggggagtttgctgatggcgtgctcgtcacggcgatgcacagccacgcccggcgcgatgccgactttgcggtggagtttgccggcataccggacagcccggacgtcggctaccggcctgagcccggcgcgcgtccggtgatggccgggacgctgccggcccgcgtgaccagcacccgggaaaacgacacctacgggcatatcgacaaacacggacgctaccgggtgaatatgctgtttgaccgggcgcgctgggaaaccgggttcgagagcctgtgggtccgccagtcgcggccgtatgccggagacacttacggcctgcacctgccgctgctggcggggacggaggtggcgattggctttgaggatggtaaccccgaccggccgtatatcgcgggcgtgctgcacgactcggcgcacggcgaccacgtcaccattcgcaatgacaaacgtaacgtcctgcgcaccccggccaacaacaaaatccgcctcgacgacgagcgcgggaaagagcatatcaagctctcgacggagtacggcggcaagagccagctgaacctcggccatctcgtggatgctgaaaagcagccgcgcggcgaaggctttgagctgagaaccgacagttggggcgctatccgggcacagaagggtatttttatcagcgcggacggacaggcgcaggctcaggggcaggtgctggatatggagccggcggtcagcaatctggccgaagcccgggagcagatgatgtccatctccggtgacgcgcagaaggcgaccgcgaacccggccgatctccaggcgcaaattaccctgctggagcagcagctgacagacctcaaaaaatcggtactgctggtcagcgcgccggaggggatagcgctgaccagcggggagcatttgcaggtctcagccgggcataacctgattgccacagccggaaagaatgcagacgtcagcgtggtgaaaaatctgttcatcggggtgggcagtgcgctgagcgtgtttgtgcgaaagcttgggatcaggctgatagcgaaccagggaccggtacagatgcaggcgcagaatgacctgatggcgttgcttgcccggaaggaaatcagcattgtcagcacggaagacagtatcgaaattattgcgaaaaaacgggtcacgataaacggcgggggaagttatatcacgctcaatgccagtggcattgaatcagcgacggcaggtgagtacagaacaagggccgggtattacgtcaggcgggaaaaagcgcagcataagcctgacattgcacctttagctaatgcgataaatgacggcagccataatattcgctacctgtgtacagatgataatggggtgccgatgatgaatactccttacagggcctttctggctgatggctcggtattagagggtgtcagtgatggcgaggggtatacgaagttgtttacttctgcacagatacaggatgttctgctgcatatgataccggaggccatcaatgcctaaatataatatttatacaaagattgaatcgaatgtttcagcagtcgaccttttttacgatctgaatgtttacagaactgatgccagtaataaaaaacatatactactgtcagtggcgcaacaaccagtaacatcaaattatcaaactcagtcccatgaaacgaatgacacagaggatgggttatctgtaatctacataatggaaatgaacttatatcgcaagcacggaggtaagttgttttctgtgctttcctcgcctgcgaaaaagatgtacacacttggtgaaatggcatcagggcaagcatattctaaaaataagcgtgaaaatgtttgttattttgagacaaaggcgcagacaaaaccggttaatgataagggtgaggataatatacatactgtgcagattacctgtcagaaaagagcgtttattgcaaaagagtatcctgtaggtagtcctgatgatcccttcgataaaaataagatagaacatcagatcctttcgaggatgaatcgcagtagttatccaaatcaaggggatactagtttgtgtgggccagcatcatttttttattgcctgttaatggatagacctgatatttataaacaagcagttaatgagctttggttgtatgggaaaactaaaataggtgcgttaaatatagttccaagcaatagttgtcggcatcctatgggggctttctatgatgcttatgaagaacgagtgaaggggatcgattggataaccctcgcttctttaagggactccgaaaattccattatgagttatgacgaaattgatgaccaggcttcagggataacattatggggagcgcttactgaatggtttgtaagtgctggttatcaaaaagagtttagtaatgtcgggctatcgcacgtaaatctgaaagaactaagtaccctcaatgagtatattagaaaaggttgtcgagttgttactttgatatcagctggtatacttgatggatttgactccactgtcacggctaagaatcattggattgtttgggatggacctataaccacacagtatggtgaggtcatttcattaacgactaaggaaaatgagttagttcaattgaaattattctcttggggtaaggtaaaaaatcagattaagaggcatcttgctctttcagatgtaatgggaagcatttttggaggggtggtgtttaaatcactagaatagttttatgaaaaaatatctaatctgtttgtttgtttttttagcatcctgctcttcaggtaaaatagagttttatccaagtggggggcggttgaaaaatgccaagatagggacgttttatcagcaaggtttggttatgagatttcaggggagtggagaggttatttcttttatttcaagtaattttagagcaaaattaactcctgataattccggtctggatatagaaccaagctttatggggaatgaaaaaaatgactttaacaaaggtagcagccctaacgaacttgtaataagtggagtgcccagaataaaaggtgtgataaccgttgaaatagttgcaaaaacatatgcatctatgtattcaaaatcacaggtgtttactaaaaaatatcaaataaatgttgattgaatttattttagatcatgtctttaatgatattaaagtagacaatgtggtcgccggtattacaatttggaggggtgatatcgagtggttttaaaagagtgggtatgtcaaggtgggcacaagtaacaccaggtttttttaccgtaatcctaaaagcctgacgaaataatcgaaagatcttatccctggtaatttagagatggagttttttgaaaattgaggaaggaatttaatctggataatcactaacgaaacgagtttagaagagcttgtctcgctgagacttttttcatggggtgaagttaaagataactcgcttcgagtatcattaaaattaggagaatttctaaaccatacttttggggggatggtatttacaaaaatatcatgattaaaaatgaatcactatctaagagcttttgtaatttctttctttctaactggctgtggcaatcaccttgtatttgagcctaataagttaccaggtggatatatagatcaggaatattatgttccaatcaccatctctggaggtacaggaccagttgttgatctgagttatgaaattcacccatcaaattctggattgaaattagtattttctgaaaaaaatattacacaaaatatgtatataataactttactatagaaggtaagcctcagttgcaagggattgtaacaattaatattaggggcggggttgttgctagtgcggggcaatattttgaaaaacaatatgagattaatattcagaaataaacaggtaataacatcttggaaggcctgctgagagcgtgcgggcgatagctgacggtaccgtcatttcactccgcaaaagctcagacaagcgcgacctagcaccattcaacatcaacgccgataaacccaatacaaaggggagtaatgatggttatgtgctcataaagcatgaaaccgagatcggtagcggtgatgaaggaaaagtggctttctattccttatacatgcatctgaagtcgctggctgaaactgttaaagccggtgataaagtttaccgtaaggatcctataggccttccaggcatggttgatggagtgaatgctttccatttccagattttctgcgatgatgacaacatcagcaagctaacgggcaggaaaacaggagagctggatatttcgaagaatggccgcaccgatgcggtttatggtgatattcacttttatctgccaccgcagacaaagttttatgacaaggctccagcagataacagcatttctaccaccggactttctgaactatataccagcaatgtgcctctgtatgccagcatgactctggcccaaggcaagtgcacgatggttactcgtcagaaaaatacgcagactgacggaaaatatgatctgctgggtgaaccactggttaatgcagatggtgatgactacgaatacaatctctataaaaccgcgatgcggaattataaggagagcccaagtgccgggtttgaattacttcgctttgggcgagtgatcaacacggaccatgaaacactggtaccggcagacgcaccattatggatgacagtcaattacccgggtggtaaaggggtgatcaaccttgctgattccagtattaaaaagtttagtgacgctgatttccctcactggacgggctggcagatggtagatgacgatagtgatagcaacagccagtgtaattcagctattatcaagaaacttcacgaagttggtgacttcgataaccagtgcgggaagctaatctgtcatttcccatttgaatgggaaaaaagtacgatcgacatccgtttttcgtggctgaaaacgggaaatgaagagcatgaaccgatgacggaagccgattatgcaaagtttaaatcccatgcggaagcactatgctttgattctggagcgttgagttctgaccggttgtggcattttgagccaaaatcatttattcgacatttcaggaaatgtagttggctcgactctgaagtaattgaaaaagtaatgacggcgaatgctagtaaaaaaaataaaaatgcacttgaaggtattaaaaatattacattagagtactatgcggacataaatacaatcatgcgaaagtataacttatctgatgcaaatagaatttgtcattttttagggcagggtgcagttgaatcaggttatttattgtccatgcaagaaactagccagcaacaaattattgttgatggtgttcagcaaggtggtgtgattgttgaagcatcaacatttaatgaaactactaagctaggtcattggtacggagctcttaaagccgagaaggataactatttctccgggaaaaaatacaattcccgtggagggtatatcacaggatcctatagctggattaacggtaactgtggagatgtagatgcacaaaaattcagaggtagagggtttaaaatgctaactggacttaacacatattcaagctactgggtatatcgaggttggttgtcaaaaaatgactttgataaatattggtgggatgacccggagtacaagaaaaaaattcagccggtatgaagaaaaaaccaccaaaaataggaaaccctcagaaagtgacagaaaatgcatataactgtattgatacaggtggtttttttatagtttgttttaagtctaaagttctcaaaattatggatgaggacaaaattgggaaatctgatgatgacagcattattttgaaagtaactaaaaatataaatggtgcagataaaggaattgcagaaaggaaaatagctactaaaaaagcaaaagagatgattgatgatgaagtttaaaactaattcatttttgtttatgatgctttgtgctactgctcttaattcttgggctggatattacaacacaattgatatcgatggtgtaagcatccatttagataaggataaagctggatatgtaaatgttcacgatgatcaattaaatacggattactcatgcaaaatagaaaattggaatgattcattaatctctggtgctggaggtatttctctaactagtgatcatttaggcgtgcttttagcatcaggaaataaatatcttgatgttaaggagcttatagattgcaaaggacagtcaattcgaattcattctattcattactttaataattcaatttcttctattatagatgttaattttgaaaaaaaattagttctggcattagttgtgattgatgctcactttaggtcatatcaggcgatagtatctaagtttaatgggaataaaaaccttttgtcaggcaaaggtttttggagtaattcctcatctgagccagatcagaatagcttgttttaccctggtggttcaatatatctagggaaaatatctgtcaatggagaatatattgcgccaaacgatttggattgtgcggttgattcattcccaggtgtgtgggatatagcaagaaaaatgaaaattatattcccaagagataaagatgatgctgtaattgacagtaaatgccgacagcttttctcgggagagaaaacacttgatgaattggggggggagcttatcaatatgaaatgatgctttttcaaatggctatttactatcagcgcaaaaaattttctcgtgaatcattagcaattgatcccaatcatactttctcatgaggataagcatggattatcaaccctcagtaaaatcaataattttttcggatttgatagcaaaactaaatctgtgaaagatgaaggtggcggtcgatgaaaaattttatagctataagtatgttactgttgttgtcattgagagtgatagcaggtgatcccggaggaatatccttacttgtaaaggcattgccttctgcaaatgattataaatatgtccttgatggcttttttagaaattattacggtgtggacaatcctcacactccttcgtgcgatcaaaatgattataccccttatattgataacgtatatttgaatacgctcccaaaaggtattgatgacaatatactaataaaatccataacagatttatcatccagaactcagattgccaaaatattatcatcttactctgatgatcaagtttctggtttcgatggagttcttttttatgcaatgaaagataataagttatttatttatacgttcgactcaaaagcccctgggcatatctttacgaatgagttgaatgttgatggaattattagctataagcttttaggaaggtccatttgccagtctataagatcaaagatactcccttccagtccttaatgatattgaggtcagtagctttgtttagatacttttcattaatcatatgtatgctgtgtttttcaagtgccattgctggggaaatgttctctgtaagtatcccgcttaacctttgatctcctccctgaaaacagtgtcaggctaaactgaagtctccggtctttcttccatctcacagagaggcacatcgccatgaaaaagacccgctataccgaagaacagatagcatttgcgctgaaacaggccgcaaccggcactcgggtggaggaagtctgcagaaagatgggcatttctgaagccacattttacaactggaagaaaaagtttggcggcatgggcgtgacaaaactgcgccgcctgcgccagcttgaggaagagaatcagcgtctgaaacgtctggtggctgatttaagtctggacaaggtgatgctgcaggaagttatcaaaaaaagttctgaggccggctcagaagcgtcaggcggtgcattttctgcgggaggcttaccgtatcagtgtccgacggggatgcggactgctgatgcagagcagaaccgtttaccactggcagagccggcgggatgatcgggcgataaccctgcgtatccgggaaatagcggaaacccggatccgctacggttgcccgcgtattcatattcagctgcggcgggaaggctggcctgttaaccacaagaaaacacaccggatttactgtctggaaggcctcaacctgcgcaaaaagcgcccccgcaggcatgtcagtgcagcacatcgtcagcaacgtccggtcctgagcggagtcgatcagtgctggagtatggatttcgtgtcggataacctgtttaacggacgacgtttccgggcgctgactgtagtggataattttagtcgggagtgtgtggcgatccatgccggaaagtcgctgaaaggtgaggatgtggtcggtgtgatggaaaggttgcgggtgctgggcaagcgcctgccggtacgtattcagacagataacggcagcgagtttatctcgaaaagtctggataaatgggcgtatcagcacggtgttacaatggacttctcccgccccggaaaaccaacggataacccgtttattgaatcattgaacggcagtctgcgggatgaatgcctgaacattcactggtttctctcgctggaagatgcgcaggacaaactcgacaactggcgcagggaatataatcatgagagaacgcattcatcattaaatgacatgactccggctgaattcatccgaaatctccggaaagacgaagatctctgatttagcactgcactgattttgggccagggtcaggttctatgtacctaattcatattattcttatgcacaaaaaataataaattcgggctcgagagaagcagcgatttctaatattgcagagttgcgtgaaagccttggagccaatctactctcgaaagaggatggaagaacaaggtgataaaaaaaatttaatactggaggtgatgtgaagtattattatgttttagcattgttacttggttacagctcatgtgtactggcagaagagtgtatggataactcaaatatagattctctaagacaggtttttaaaaaaataataagaagttgttgattgaaatgtcttcaaaagaaatgtggcgttatgttgaaagtgatttacttatcaaaaataaatacagtacacattgtcaatgtatctgaggtttactatggctggggagtggacaaaaaatcaaagtatcctgttaacacatcggcagttttcccaaatgaaaaagtgtgtgtatggaatgtatcttttgctctaccagagtctattagaaaaaatgtgatgatgatggtgcttatgggtattttattgaatttaagaaagttaatgggaaaacagttctatataactttacctctttgtttgattctcttcccgatggaactttggcttgcaaagctgccaataaatttatgctgcaaaaatagcttgtgagtattgatgtaagcatctcgctctaaattaaaggtgttgttgattaatcattattcagcgctcttgctgctttttaggttgtgttgcatattattttgtagccaataaactctatttttactaaaaatccaatcttttctacaaagtgggaaggtaattctggtaagcatttactggtgatgaaaaaggaaatcaaccagaataatactgcagagtatttatctgtaaaacaggtgacaaagggtaaggatgattgcatttcaaataattatattattgactgtgaaatggatattaatctgaatggggggtaaaagaatcagttgaaataaacagtagctttaccaatgacgaaggcactgttttatttgcttataaattggatgtattggtgggatagtcccagttactgtcaactatttcgcgtataaaatggattgaaatatgcactacgaggggaagagaatatcatggttgaaaacggtaggtggggtggagaaaaccctccgattcctgattataattaaaaaagacaagtctctgttaaattacatgctgaaaaaaatggaaggccacttcaacgacaaaagtaaactagcacgttgatttctgttttttaccaaaaaggatggtcgtatgtttaagtgtgagtttgctaatgaaagaaatataatgtggtgagtttttgtttcgcctgcatatcgagctaatttagccatcctgtaatatgaggaaattaatgccatatacacttaaacatttgccagaacgctaccccagacctaagcctctgaaattttctcgttggcttgttgctctggttgtcatgctttcagtcagtattatcataatgcgtatatttgggcattatgttgaaaatctgtacttctggagattagctttaggttttcctgttgctttgtggagtgtcttgctttcttctcgtctgcttgtttggtctttacaggatagcaaagcaaacgcttttgacaaacagcgagaacagtggattcttcgagaaacccgtaaggcacggcgtgcattacaagtgctgagtgcaacatttattaccggccactcatcagttgctcagaaagataccgctattgctatgcaaaataacgacagcattattgtttcacaggtcggccgggatggtaatgaaagcgccagaatgagccaaatttcttccagcccgcaggattctatggaattcgtgataatgaatattttttcgcagatgattgcagacattccttttacacaaatccctgataaatgcccactagtagtagtttttgatgtaacaacatcgctgcctttggagaacattcgccattactgggatgaggcatggcaaaagaacaatatcacttttcctgttgaacacgttgaagggcgtggtcttagtgtaattgaccgctggttaaatgaacgtattaaagataaagcaatgttattgatcgttggcctccagattgatccggttgttacaaacaatactgctgaagcggctgttgctctacttcttggcaaccgcctaacgcaagaggcgcttgaccccctcgcattactacaccggccagatgctgctccctcaggtgaacttagcgaagggatgaggatggccgcctggaacgtcccgctaaaagaaagtatggtgaaaaatttatggctcgctggaatgacaggtgagcaacgtgcagaagcgattggatgtcagaatgcacatcctgcgcagtgcgtaaaagatgaggctgtcatttcactcgatatatccatggggaatgctggagccgctgcaccctggctggctattgctgccgccactgaaatcgcccgacaaacacaatccccgcagatgattatctgcggggataccactcagaaagtgctatggagcacgcttattaccccgatagcttcaagacaggagatggatctgtgaagttacttttagcaccgaaaactacggaaggtcgctatctttcagtcgtattcattctctttttactcttggctgcaatgacatttatcgtctggaaacatcctgacatggccggacttgagggcgatagtcagcagcagaattactggcttattggtgggtgctgcattaccggatgtatctttatcatgttagttatgctcctgtggacagctcgcagtgccggtaaaaaggagtttgaggcgctcctggatgtcactcgtggtgatgacaataagagaaaagatgagagtgaaaacatctctgtttctccagcagtggtgatgtgtgccaggattcgtgaccatctgcgaacccgaattggaattcactggcggcgcaaagtccgcctgcttttagtcaccggcgacgaggcggcaatcgaacaactggtgcctggcctgcgtcagcagcactggcttgaaggcaaccgcaccgtgctgatttacggcggcagccttgcatcggagcctgaccgagaaaaatacatcgcgctgcgcaagctgcgccgcggtcgtcctctggatgggattgtgcgggtgatgccgtcgtctctcaccctgacgccgcagataagcgagagcgacctgcgcgggctggaaaaaatcagcgaactgctgggctatgccgccccggtctggttatggaaactgtgcgacagtgagtggccgcaggctgaccgcgcggtgcaggcggtaggggttagcttcccgttgcgcgccactgaggaagatgtcgcccgtcagcttgcgcagatgttgcccacgctacgggagcaggggatgcaccagatcgcagcggatacccgccacgacttcctgctgcgtctggggcagcagcttatcgacggggagatcgcacaatggcgccggcagctggcgccgtggctgaccgcctcgcggcagcggcttgcgctgcgaggcctgatgtttagcctgccagagcctcgtaccgtagatccgtatcaggagacggatacctcgcctgcgggccagcctcatctcctgacgctgcccgtcacctggcaggggatcgtcgatgactgccgccgtttacgcgggcatcacgtgggaatggcgtgggagcggggcctggcgtgcggtctgctggccatcctcggcctgtgggcggcgggactgctgctctcctttgccctcaattacagtcatattgcttcggtagcgggaaaagcccgcgacctgatggcccacccctccgtttctgactatcaactgacggccctccatgccctgcgcaatgaggccggccgtctcgtgcacgatgggcagaagggagcaccctggtatcggcgctttggtctggaccatcatcagcaactattaaacgccgtcctaccttggtacggtgtggcgaatcatcgcctgatacgtgacccggccaatgccgcgttgcagcaggcgctcagcgcgctggtcaactccgcccccaatagcgaccaacgagccaggctggcgaaaccgggctatgaccagctgaaagcctggctgatgatggctcgtccggataaagccgatggcgcatttttcgcgctgaccatgaaaacggtccagccgacgcgaatggggatctcgaccggtctgtggcaaagtctggcgccggatttgtgggccttttatctctccctgctgcccgagcggccagagtggaagatcatcccggatgcgcaacgggtgagtcagagccgtcaggttctgttgcagcagctaggtcgccgcaatgccgaaagcaccttatatgagaacatgctcaaatccgtgcgtcgtaattttgccgatgtgtcgctggaagacatgaccagtggcaccgacgcgcgccgcctgtttaccaccgatgaagtggtcccggggatgtttacccgccaggcatgggaaggcggcattcagcaggccattgataaggcagccagctcgcgccgggaggaaatcgactgggtgctgagcgattcgcgcaaaacggtgtcgacagacctgtcgccggaggcgctgaaagcgcgtctgacccgacgctacttcaccgatttcgccggcagctggctgaattttctcaacagtctgcgacttaatccggcgaccaatatcgccgatgttaccgaccagctcacgctgattagcgatgtccgccagtcgccgctgattgccctgatgaataccctcgcctggcaggggcaggcggggcaacaaagggaggggctgtcggacagccttattaaatcggccaaagatctggtgggcgggaaagacaagccggtcatcgaccagtcggcagccggcccgcaggggcctctggatgacacgttcggcccactgctccagctgatggggaaaaacacgggcagcaacgtcatgtcggccgatagcaccctgagcctgcaaacctatctgacccttatcacccgcgtgcgcctgcgcctgcagcaggttgcgaatgccaccgatccgcaggagatgatgcagaccctggcgcagaccgtcttccaggggaaaagcgtcgacctgaccgacacgcaacagtacggcagcctgatttcggcaagccttggcgaagagtggagtggcttcggtaatactctgtttgtgcagccgctgactcaggcctgggaaaccgtgcttctgccgtcggcggccagtctgaatgacaaatggcgccgatcggtggtcgccaactggcacaccgcctttgacggacgctttccgtttgccgccagcaaaagcgacgcctcgctgccgatgctggctgagtttgtgcgcaaggacagcgggcggatcgaacgttttctcacgacggagctgaacggtgtcctgcataaagaaggcagtcagtgggtgccggataaggtcaacagtcacggcctggtctttaatccggcctttctgcgcgccatcaaccagctaagccagctgtccgacattcttttcaccgacggaagccaggggatcagctttgagttacaggccaggcctgccccggaggttgtcgagacacagctgacgatagacggccaaaagttgcgctatttcaatcagatggccgactggcagactttccgctggccgggggagacgtataaacccggtactctgcttacctggaccaccgtcaatgcgggcacgcgcctgttcggtgactacagcggcacctggggttttattcgctggctggagcagggtaaacgccatccgctggatcgcagccagtggatgatgagcttctccgccccggatggccgcaccctgcagtgggtattgcgctcccagcttgggagcggcccgttggcgcttctggcgctgcgcggattgaccctgccggatcagattttcactgtcgatgcggctgagagcgcacaggccctgacgacgggggtagggaatagtgacatggatgagatggaataatgagcattttacaaaatttggttgccgccagtcagttggatgaaagcgtactgcgccagcaggcccggtcacgtcaggcgcagtggcagtcctggcttgcgccaatcagtgacgcccaaccaaccggggacgatccgggctatgacgatgattttcagcgtatccgcgaggaggtcaataagatctccggtgtcgataccgtactgatttgccagttggctggacagttactggcaacaacaaaagatatccggattgttacctattactgctgggcccgtttgcaccaggacggggaagctggcttggccgatgggctggagctgctggcaggcttgctgcaacgatatggtatgcagctttatccgcagcgcgaccgtagccgcaaagcagccctcgagtggctggcgggtactcgtatcttagacagtctttcactttttccagaagttgtgcgggaggacgcaaggcgtaccgtcggcgcgctgcttctcattgatgattgtctgacgacagaaccagaaacatcacggccagatctgcaagcactctggggtgctctggagtctcgtttgataaagggcgggggagtcgatgcggtggtgccgcagaacgtcggaaaccgggggctggctcaaaccgcttcacgcatggctgaatacgaagcgccggttctcagtaacatcacctccggtcaggatctgctggcccaggcgcgaaccctgacagcatatctgcgtgttcaacccgatggctggcttgccgcacatcggctaatgaaaagccttcgtcatgacaccttgacaatcatccctgcgcctgatgctgaaggaaaaacacgtatcgagcctcccagagcagatcagcgtgccatgctcaagcggctgtacctgcaacagagctggtcggagatactggaacaggcggacagtaccttctcacgtggcgctaaccacctctggcttgacctgcaatggtatatccatcaggcgctggtgaggtcgggtcaggatgtgctggccgatattataattgccgatctgaaaggattgctgcgccgtctcaccgggcttgaaacattagcttttaacgacggcacaccctttgccgatgaggtcacgctgaactggataaatcagagtgtactcgacgatatgtccgtctggcaggatgagccagtatcggctgccagcggcgctgataacgacattctggcccttgaacctgaagcgctcgagaaggctgacactgacggtctcgatgctgcactccactggattcagacgcgcccgggcactgaatccactaaagaaaaatggctgttgcgcctgctgatggcccgcgtggccgaacaaaaggggaagaatgacctcgcgctctatcttctgcgagaactcgacgatgcggcgggatcaatcaccctcacgcagtggatcccagccctgttgttcgagattaaatcgcgacggctcaggctactgcgcatgaaagccacgcgcagcgagagtgaaaagttacgattgcaaccggagatggatcaattgctggcaggtctgattgcgctcgatccagccagtagcgcggtgctttgcggctaacagaacggaaactgacactaaggagaacatatggcagcaaaaggtttttatctggtacagggagacagaacgacctgcggcggaagaatcactacaggcgcagaagatcacactctgtttgataaacctgttgcccgggagcaggacagcgtcacttgcggaaagcacgcagggctatacaagattgccggtggcatcgacaacgataccattcatggccggcgaatggccggaaccctcgacagctgtagtacttgcccctgtaaggcgaagtttattccatcaatgatgaatgatacttatgagaaaggaggtgaatgcataactactttattttcactcgatgggcttatggcatctttacaggaaccctataagaatcttcatccagaaaataagactgaacgacagtgtactcacacagatggggcgattaaagttgcagaatatatactaagtgaaataaaggcgaatgtcagaagcgatatggcagaaacaatacgatatttaatcgacgaagattttataataaaaagacttactgaatggaataaacttcccttttatgcaaggctggggccgccccctaaagcagatttacttgctgcaatggctatttggtatcagaccgtgaaaacaggttcaatctgggatcataaaccgaagatccgcgattttttttcatccgttgcagtagcacgaccacttcccaggaaaggaaaatcatcaaagtcttattatcataagtttaaacggcatgattatttttatgatgtttggtcaaacatacattatggttatgttggacgtagtgtcggtttttctgaagcaattctcttgaaagggtccacttgggaacaaaacatgacgccaggtgccatgggggatgataccatggatgacattactagcatgaaaatagggtttaatctattttatgaacatgggaaatttgctgagacgttgacggcagataatattctttgcgttttagaaacaacacctggcgcgcaccttcctcactcaagagaaaatcattggtgctggaatacagataatccagaaaaaagtgacgaatcattttgaaaaaaacaaaaacgttaacgggtattgcattatttatagcggtgttagtccttgtcgctcattttattccgataaggccagtcgttgttattataaataacactaacgaaactatattcgtatatgcaggtgagagtatatataatgtcgaacctgagcctgacgaagtcgcgcgtatagtacgatcaaagcctgaaattatagcacctggaaaaagagttaagattaaagcttcgtttacatctctgattaggaaagatgcagcgctcgacattggttggagggttggtggtcaatacgaatataacgctgcaggtagcggtggtcaaaattttattctttcttcaaaagagggcgtgtgctacgcatcgatttatataaaagatgatttttttaagggcgcgattaaaaatggttcaagcaataagtgtttaaaaaaaataaaggcatttaattataagtattaattcaggtgttataaaggttatttttttagttgccagtggctttgttgaataaatcagatttcgggtaagtctcccccgtagcgggttgtgttttcaggcaatacgcatgctttcaggcatacctgctttcgtcattttgttcagcgctcgtaccagggccatagcctccgcaacctgaccatcgtagtcacgcagcgtcagtgaacctccgaacagctgttttacccggtacatcgccgtttccgctatcgagcgacggttgtagtctgttgtccatttccaccgcgcattactcccggtcagccgctgattcgcaacagcacggttacggtctgcatattcaccgggccagtaacccgcgccttttcggggcgggataagcgcgctgatttttttgcggcgcagttcatcgtgacagagccgggtgtcgtaagcgccgtctgccgatgctgccctgatttttctgtgagtctgccggataagacccgggaaggcctctgagtccgtcacattgttcagcgacaggtcagcgcagatgatttcatgtgttttactgtcaacggcgagatgcagcttacgccagatacggcggcgttcctggccatgctttttgactttccactcgccttcaccaaagaccttcagcccggtggaatcaatcaccagatgcgcgatttcaccccgggtgaacgttttgaaactgacattaaccgactttgcccgcttactgacactggtgtaatccgggcagcgcaacggaacgttcatcagggcaaaaatggaatcaataaaaccctgcgcagcccgcagggtcagcctgaacacgcgtttaatgaccagcacagtcgtgatggcaaggtcagaatagcgctgaggtctgcctcgtgaagaaggtgttgctgactcataccaggcctgaatagcttcatcatccagccagaaagttatggagccacggttgatgagggctttattgtaggtgggccagttggtgattttgaacttttgctttgccacggaacggtctgcgttgtcgggaagatgcgtgatctgatccttcaactcagcaaaagttcgatttattcaacaaagccgttgccagtttcaaaatctgatgattgaaaggaaatcaatattaatttatggacgatttaaccctgcgttattacgacgctgaaatgcgctacctgctggaagcgggtgaagagtttgcccgcgctcatcctgagcaggcggcaatgctcaatctcgacaaagcgggcgcccgcgacccctttgtcgagcgcctgtttgaaggttttgccttcctgatgggccgcatgcgcgagaaactcgatgacgatctgcctgagctgaccgaaggcgtggtcagtctgctgtggccacattatttacgtaccattccctcgatgtcggtcgtggagttcacccccgactggccggaaatgaaagaatcgatgacgataggcaaaggttttgaagtgctttcccggccgatcggtgaaaagggcacgcgctgccggtacaccaccaccaaagcgatcgctctgcagccgttatccctggaacgcgtccagctggccaccgatacggatggccggtcggtgatcacgctgcgctttacctgcagccagctgacggactggcgccgggtcgatctcagtcatatcccgctgtactgcaacgccgatgcgccgctggcctgcgccatgcacgaggcctttaccctcaatgtggcccggatgtggctgcgcatgcccgatgaggtggacagaaggccgctggacgggtatttcagcgcgctgggatttggcgaggatgacggcctctggcctgaagatggccgcagttttcgcggttaccagctgctgctggagtattttaccttccgcgaaaagttcatgttcatcgatctgcgcgggctggagacggtggcttttccggccggactggcgtggtttgaaatcgacgtcgtgctggcggaacgctgggaacatgacttccgcttcagcgaaaagcagctgcgcctgcactgcgtgccagtgatcaacctgtttccgctggagtccgatccgctgaccatcaattccctgcagaccgaatacccgctgcgcccgatgcgcgtgcaggacggccacaccgaaatttacaccgtcgattccgtgatctcctcacaccagcaggtttacgcgccgttctcaagttttcgccacaaaggcggcatgatgcgtcatgacgcggcggactattactatcatacccgggtgcgccgtggcccctccgggctgtacaacacctggcttatcgtcggcggagaagcctttgataatcataccgtaccggaagatgaaagcctgtcgctgaccctcaccggaaccaacggccagctgccgcgtcgcgcgctgcagagcaccgtgctcgatacggtgatgaaaaccacttccgccagtattgcagtgcgtaacctctgcgcgccgacgctgccgtgctatccccccgcccaggaccgttttcactggcgggtgctgagccatctgggcagcagttttctttccctgatggataacgcggaggtcctgcgcggcaccctggcgctgtatgaatggaccgacagcgagatgaatcgtcggcgtctggaagccatcctcgacgtgaagcaccgcgcaacagagcgctttgcacagggccatctggtgcgcggcgtacagattgaagtcaccctcgacagtcacggctttgccggacgaggcgatatatgcctgtttggcgagatgcttagccgcttcttcgcgctctacaccgacatctacttgttcaaccgcctgattatcattctgcaaccaaccggagaacgactggaatgggaagagaagcacagccgccgcattcccggctgaccccgcgactggaggccgacctgccgcggatcaatttttaccgcttctgccagcttctggaaaaacggcgtcccggccaaccgctgatggggggaaccagccatccggctgacgatccggtgcgtttttacccgcatccgggaatgggatttcccgccagcgaactgaaagccgtggaatacgatgaggccgatgacagcaggccgccggtcattcgcaccacctttatggggttgtacggtgtcgattcgccgctcccgacggcatatctcgatgatatcgcccagcacagggaagggcatgaagcgctgcagggcttactggatatcttcagccaccggatcatgacgcagttttaccgcatctggcggaaatactcctggcccgccacctttgagcccggcggcaccgatcgtctctcgcagtcgctactgggcctggcggggctgggcatccccggcacgacgcagcatatcgcctcgccggcgtcgcgctttctggcgctaaccggcgtgctgcgtcagccgggcaaaacccagcaggggatccaggcgctggtcaccctgctggccccggagaccaccgtcagggtgagcccgtacagcctgcgtccggtggcgatcagccagccgctggggttttacggcgatgacgacttcttcctggacggcaatacgccgctgggtgacgaagcgatggatgccagcagccagctcctcgtcgcccttaccaccgacaatcccgcggaggcgcggggctggaagcctgacggcccgctgtttcgggactttctcatcctgctgcgggtatacctcggctggcgattccgggccaacatcaccctgaccgcgccgacccgactgctggctgtcccgccgctgggggacgagccgttctggctcggtatgaacggcgtgctgggcgtgggtgagggcgagagtgagggcgatattcctcagacctttaccacccagctgggtacctatacgggcctgcagcctgccacctttctacaaggaaaccgacgtgttacgtataagtttgactaaaaccgcctgtctgctgcccctgcttgcgctttgcctgagcggatgcggactcacccagcgcgtctcggagggaacaaagtctgccttcaacgccgttttttataagaaaattaatacgctgcatctggactttaccgcgcgcgaagcgctcaacaccgatgccagagagaatcactcgctctctgaaccggtggtggtgcgcatctatcagcttaaagatcgccagacctttgaccggctggtttaccagcagctgctggaggagggggatattctgctcgccgccgatctcctcgccagtcgcgatgtggtgatcggtcccggaggggacgccagtctcaatatgccgctggaagcggaggcgacgttcgtggcggttgtcggcctgttccgccatccggacacacaaagaaatacctggaagcaggtgctggcgcgtgaggaattggatccggacaagccgcgcattttcaccgccgaacacaaccagctacggctcaggcctgaagcggcgaagtaacgtaaaaaaaacaaacatttgcggcggggccatcgcgccagttcgccctcaatcttcgtaaccagcgaacgggcgataaccatcttcatccagcccaaccggtttcatcacagcacagggagataacgtgacagcgagggaacgtttttttaagaaactgcagcaacagcaaaatccgcggcggacagcggccctcgacgggtcggccgccgcggatatcgccaggtttcgtcagcagatggcggagctggctcagcagataagtcagtggtttgatggaaccggtattgaggtggtgatttcgacccgccatctccacgacctgagtacccttggctacagcctcaacagcggcatctgccgctacgatatcccggccattcgtctgcaaaacggcgagcgcagcgtcaatatcgtgccgcagcagctgttggatggcgtggaaaaggggatcgtgaccctgagtcttgaggcgcccgacggcgcgggctcccgggaggtgttttatctgagcctggccccggaggagggctggatgatccgcaaggcgcaccagcccccggaagcgcggcttatacttaccgaagatcgcttttttatggcggtagacagcctggcctgaagatccctgacaggcgatgacgttcccgcggcggcggtgcaaagcgcgcatcgccgccctggggtatcaggcgccaaacgctccgtcgatggtgtgcatggcgccagtgacaaacgacgcctccggaccggccagccacgccaccattcccgccacctcttccggacggccatggcgcttaatggccataaagctgtgcatcagctctttcatcgggccgttctccgggttggcgtcggtatcaattgggccgggctggacgacgttgaccgtgatgccgcgcgggccaaaatcccgcgccaggccgcgcgccagcccctgcagggccgatttgctgagcgcataggccgccattcccggcaacggcatgcgatcgccattgactgagccgatgacaataatgcgcccgccttccggcatgcggcgcgccgcttcgacggaggcatggtagggggcgtgaatattgatgtggaacaggcgatcgattgcatcgctgtcctgctcgagagcgtcaccgaaaagcgcgatcccggcattgaccactaacacgtccagcgggccgctgtcgcggaccaggcttatcaccgcatcgcgatcggcgctgtccgcctgcaccgccgtgctgccggtctctgccgccagccgctcggccgcttccggcgaaccggaatagctaaacaccaccgacgcgccatcggcgacaaaacgcctgacgatcgccgcgccaattccccgactcccgcctaaaaccagcactgatttgttgtgaaacgctgtcatatcccacacctcatgatattgtagtgatgattacaatatgctgcggctaaacaggctgtcaaggattaatttagtgaccactacaaaaccagggcgcactccgggacgtccccgccagtttgatgcggaacaggccattgaaacggcgcaacgcctcttccacgcgcgaggctacgacgcggtgagcgtggccgatctgacccaggctttcggcatcaaccccccgagcttttatgccgcttttggcagcaagctcgggctgtatacccgcgtcctgcagcgctacagccagaccggggccattcccatcgatgccctgctgcgagacgaccagccggtggcggcgtcgctcatcgccgtactgcaggaggcggctcgccgctatgtggccgatccggccgccgccggttgcctggtgctggagggggtacattgtcaggatgctgatgcccgggtggcggcaggcgaatggcatgctgcggcaagagccaaaatccagcagtatatcgcccgccatcgcccgcaggacgcgctgcgggtgactgactatatggatacgctgatgcttggcctgtcggcgaaagcgcgggaaggggatagtctgccgcgtcttctggagaccgtgcggctggcaggcctggcgctggagcgcatcctgccagcctgagtcgtcagatggtttgtccgcccgacacctcgatccgctgggcggtcacccagcggttatcgtcgcgtagcaggctggcgatcatcggcccaatatcctcgggaacgcccacccgtcccagcgccgtcatggcggcaaactgcgcgtttacctctgcgtcgtcccgcaccagcccaccgccaaaatcggtggcgatagcgccgggggcgatggtattgacggtgatgccgcgcccgcccagctcgcgggccatgtacacgctcagcatctccacagccgctttggcggcggcgtaggcggagaagccaggataggagacgcgggtcagcccggaggaaaagttaacgatccgcccgccgtctgccagcagcggcagcagggtttgtacgaggaaaaatacccccttaacgtggacgttaaacagcccgtcgaactgcgcttcgcgcgtttcggccagcggggcgaattcgccgtgccctgcgttattgatcaggtggtcgaaagtggcccgcccccagacgctggccagcgcgctgccgaggctgtcggcgaaggccgggaagctggcggtttgcgccatatccagcggcagggcgatggccttgcggcccagggcgcggatgtcggcgaccaccgcttccgcctgttcgagactgccgcggtaggtgacgatgacatccccaccctggcgggcgatatccagtgcggtctgacggccaaggccgcggttggcgccggtaataagtgcaatcttagtcatgttcggtcctctctggtatgtggagtccttacaataggagaggctcaccgggccgggttgcccaatccttgttattttttgcccatttctctccgttcactcccttttgccgggaaatagcgcatactcaggctttaaaacttgcctgaaaggatcttatgcgcgacgctctgttcgatctctgccgccggtttgccgatgctcatgtcgatagcagcggggtggcagttaccccggttcccggtattactctggtgcgggccctgcatcctggtgacctgcaggcggctatcgccaggccgctggtggccatgctgctccaggggcgtaagagcgtgaccaccggcctggcaagctttgactatggtccgggcgaggcgatggtgattgccgcggatgttcccactaccagccagatcaccgaggccagtcagcgttttccctattacgcgctggtgctggagctggacctggctatcctgcgcgagctgcaggaggccgggccgtcagggccggatgaggcgccccgcgttggtatcgaaccgatgaacgccgatgtgacggatgccgcttaccggctggcaaggctgtttgatcaaccgggggcgctggcggtgctgggggaaggtctgcggcgggagctgcattactggctgttgcagagtgtccatgggccggccatccgggcgctgggcgccgtagacagccattcggcgcggatccgccgggcggtggcgatgctgcgccgggattttatgcagccagtcagcgtcgacgcactggccgacgccgccgggatgagcgtctctgtctttcaccgtcatttccgcgccatgaccacgctgtcgccgctgcagtttcagaagcagttacgcctgatccacgcccgccgcctgatgctggcggaagggatgagtattgcgcaggctgccggggaggtgggctatatcagcgtgtcgcagttcacccgggaatacgctcgcctgtatggcgcgccgccgggccgcgatcgtcgacgggaaaaaatgagcgcctgacctggcgcgcgggctgccggcagctcatccctgagcctgacgccggtgctttagtccgcgattttcgccgtgatatgcactttgttgcccattcgcgcttcagtgatgcgataggtagtcacgccttcgcgggcggcctgctggcggattttgctctccgcatggtccagggtatcgccggtggcggtgatggttctggcatttgccgccaggggcagcagacaactcaatacgatcagtggaattaacttgttcatcgtcattctgtcctgtgagagaaaatcagcgcgcggtctgcagccagccggcaatgtcctgggtcggcagctggtggcgggcattccaggtgtcgcccatcggccaccacacgccatccccccgggcgaaggcggcgcgatagcgcagcatggcgtcatccgggtttgtccgcagctgctccagcagggcgggcagggtgtggacggctttgctgaacgtctgctgcgttacgcgctccacggtatccgccaactgccggtaagaggtcgtttcgccggcaacaaacaccacctcgttgacgatccgcggctgatgcagataaatcgccgtggtcaggcggccaatatccgccggtgaggtgacggtcacctgggtatcccagctgccaagggcgtgaagggttcggttggataaattcactacatcgaagtctggttcgaagagaaagctggtaaacatcccggtggagacaatgacccactccgtggcccgctgcgcgcgcagcagggtccggacatcgtactgctcgtcccagaccggctgaccgctgcctttgcctaccacatcgtaattgacgccaaactgccagggaaaatagcggggtaccccggccgccagcaccgcgcgggtaattttcagctgtgtccccggaccggcgacaaaccccatgcagttaatcacggtggtgaatccgcgaaactgatcggccagcgtctccatggcgctaccggcgatgtcgacggcgaggaaggtggctccggcgtcggccagcgcctgatggtttgccgaccgcagctggccggcttcatcccaggccgccggcgagacgatgaccgagaccgtgccctggcgctcgattaccgcaggcaccagcgcatcaagaacggcggcgcccagttgtcccgctcccagcaccaataccttttccgcatgattaaaattatcagttttcattttaactccttgctcagttaagccttgtgttgacgggctacaggttcagtgtagggggacggtcgacattcgataagtacagcgtttcgggttagactgttcgtaataatgggataatgagcgccggggggtaacgaaatggacaaactggatgccatgcaggtctatgttgcggtcgtggatgcccacagcttcgcccgcgcggcggaggtgctcgggcagccgcgctccacggtatcgcgggtggtgaaggagctggaagcctggctcggggcgcagcttctccagcgcaccacccgcaagctcagcgtgacggcggagggtcgccggtattatgaggagtgtaaaaggctgctggccgagatggcggcgatggaagcctcctttcctgggcgctcggctcagcccgccgggcggttcaaggtagggatgccgcaatcccttgcccgccactgcattctgccgaggatcggcgagtttttgcagcagtatcccgatctggagttgatcctctgctcaagcgacaacgtggaagatattattcaggagggattcgactgcgtgatccgtaccgggcggatcgaagattccaccaccctggtggcgcgtcctctggcccgctaccgctggatggtcctcgcctcgccggcctggctcgcggcccacggccggccgcagagcatcgacgaactgcaccagcatcgggcggtgggctacctgaatcaccgtaccgggcggaccatcgactggcttttctccctcgatgaaggcgactgcgcgatccgcatgcgggagacgctggtggtcgacgataccgatgcctacattcaggccggcattcaggggctgggcctgatccgcgtcgccagctatctggcgcaaccttatctgcagagcggggcgctggtcgcctgtctggagcaggccgcttctgatcttcccttgtcgctggtctatccgcaaaaccgctatctgccgccggcggtgcgcgcgttttatgactggagcaggcgcgtgctgcaacccccgcacagcgaggcctgatgccggggcatcggcccggttattggccgcgcatggcctgttttaacttcgtcaccagccagttcagcgccggatcctgcgcccgccgtttgtgccgcaaaatgcacagcgtaaattccggatacgctaccggcggagcgtccgcgcgcagcgcatactgcgcctgccagcgctgcgccagcccctgcgggacggtggcgaacagcggcagggtggtcagcagcaggggaaaggtggagaaattctgcgtggcaaagcgcacgcgccgcgcgagtccctggctggcgagctggcggtcaatttcaccgtggccggtttcgcgataggccaccatcacgtgttcccaggcgacaaagtcgctcaccgacagcggcccgcggcaggggatctgctgcggcgaccacagggtggtgactcccatggtcatcactggctcgctgaccacctccccgcggctctgtttgttgacagacaccgcgacatcaatgcgctcctcctccagcaactggcgaacctggaaggggtcggcggctatcgactgcagtgacactccgggcgcctcctgcatcagcccgggtaacagcgggggcatcagccagtgttcgctccagtcgctgaggccgatgcgaaaaagctgctgcgcgcgcgccgggacgaactctccggcgccaaacatcgccgaatgaaggttttccatcagcggctgcaggtcggtcatcagcgcttgcgcccgcggcgtcggcagcatgcctctggcgctgcggacgaacagcgggtcgtcaaacatctcgcgcagccgtttcagcgccccgctgatagccggctggccaagatgcagtacctctgcggtgcgggtgacgctcccttcgcggtacagcaccatcaagactgtcaacagattcagatcgatacgactaaaatcattttcaatgattttgttcattatgataatcaatttgaatgtgggttatcccggcagcatagtgaatatcaccccgataaatcaaccagcgcaatgcgcgcggagggagtgatgcaaacttaccagacaggcgatagcctgattttcaaagtgccggagcgcgagatttccctgcagccggcagcgctctatccagaggcgttcccggtagcggaggcggaggccgttattcagccgattgcgctgtcaatccacagctgggtggtgcagaccccccacgatctgattgttatcgataccgccaccggcaatggtcgggagcgcggcggcaatccgctctatcatcaacttaacacgccgtatctggagaatctccgcgccgcgggggtgaacccggaggacgtgaccctggtgctactgactcacctgcataccgaccatgtcggatggaataccgtctggcaggacgatcgctgggtgccgctgtttcccaacgcccgctatctgtgctcggcaaaagagctgtcgcgggtgaaaaacagcgaacgctaccgggcgctgtggcttgacagcctgctgccggtgattgaggccggccagctggagaccgtcgatgtggcgacccggccgcgggtcggcggacggatcgactttattcccacccccggccacagtccggaccatgccgcgctggtcctcgccgccggagatgactacgcctgtttctccggcgatcttctgcattccccgatccagtttgcccatccgcagtggaattcagcgttctgcggcgatccccggcaggcggaagtctcgcgacgggagatgatggcgtggggggcaagccatcatgctcaatggttcaccgggcattttgccgggccttcctgcggctggctggagaaggataagcaaggtgactatcgctggcgagaggccgggaaacaggctgcagataaggggaacagtgatgaataatgcgcaaaccgtgttggtttttggcgccaccggtcagcagggcggctcggtggcgcgggcgctgctgcaccgcggctggcgggttcgggcgctggtcagggatcctttctccgccggggccgctgcgctggcggcgcggggagccgagctggtcgtgggtacctttgaagaccgggcggcaatgcggtcggcgatggcaggggtcgacggcgtcttcagcgtccagcccagttcgccgggagggacggtgaccgatgagcaggaggtacgctacgggataaccatcgccgatctcgccgtcgagtgcggggtgaagcatctggtgtacagctccggcagcgcgacgggggagacgccgaccggcgtagcgcattatgacaccaaagcggaaattgaacggcatattcgccgcctgccgctggcggcgaccatcgtgcggcccgccacctttatggagctgctggtgatgcctggttttggccttgatgaaggtcgttttcaattttttatgttgccggaggggagaatgcaggtgctggcggtggaggatatcggccatcttgtcgcggcggtttttgccgcgccggcgcggtttgccggcaagacgttcgagatcgccagcgacagcgtgaccggtcgtcagctggaggtgttattctccgcggcggcgggacggccgatcccctattcgcgattttccgacgaggtgctggccgccagtccttttctgcacaagctgaccgggctggtggacgacgggcggctggccgggcacgccgacctcgacgccctgcgccagctgcacccgcagctgcacaccttcgccggctggctggcaggccccggccgtcccgccttcaagcgggcgctgaccagcggggctcgctgggcgtttgatcgttaaaggctggtgttctggttacccgccaggcgcgctgtctcgtcggagaccggccgccgctagccggcagtcaggatcgcgtcggccagcaccgctaaaatccgctctgcgcgcggggcatgggacggttgctcccgcagccaggcaagcgcggcgatcagatcgaacagctcctctccgctgagatctggccgtgccagcccggcctgctgcgcgcgggtaagcagcgacgtaccggcggcgcgcagggcaacgcaggcgctgtgcagggcggactcatgatcgtcgatggcgctcatcagcggggcgatgatcccgcgatgctgatgggtaaacgccacgctctcggccagccactccagcagcgccgcggcaggatcggcggcgagcagaagcgactcagcccgggcggttagcgccgcaaagcggctgcggagcagggcttccagcaggctgtcgcggttgggaaagtggcggtagagggttcccattccgaggcccgcccggcgggcgatatcgcgcagcgacgcctcagcgccttgctccacaaagacgtcccgggccacctcgatcaacaggtcataattttttctggcatcagctctcattggcgttccttgacaatcggagcactgctccatatattcggaacagtgctccgttaaatataacgcatttccatatgaggagaaagcgatgtcgacgcagatgatgaaggctgttcaacagcacgcctttggcgggccggaagtcctgagctatgaggatgcgcccatgccggtcctgcaggccggtgaagtactggtacaggtgtacgcggtgggcgtgaacccgccggacagctatctgcgcgatggctatcaacagctgccgccggagtggcggcccgaggtccgctttcccttgatcctcgggaccgatctctccggggtggtggtggcgcgggcggatgacgtccgggaggtggcggtcggcgacgaagtgtatgctatggcgcgttttcccgaaggggcggcagggggcagccgcgcttacgccgagtacgttagcgtgccggtcagcgacctcgctcgcaaacccctaaccctgagccatcagcaggctgccgcggtgccgatgtcgctcctgaccgcctggcagttcatgatcgatcccgggcatgaggtggcgaatccgctgcagccggggccgcatcggccggtgccgctggcgggtaaacgcgtcctggtcaacggcgcggcagggggagtcggtcatttcgccgtgcagttggcgaagtggcagggcgccgaggtgattgccgtcgccgcgggctgccatgaagcctttttacgtcagctcggcgcggatagcgttatcgactatacaaccaccgcagtggaggagacggtgcgtgacctggatctggtcattgatgcgccgggcgggccggccagcggccgttttttgcgtaccctgcgacccggcggcgcgctgtacccgatctttccgctcggctttgccggggcggaagaggcgcgacagcgcggagtgacggtctccaccacccaggtacgctccagcggcgcgcagctcgcccggcttgccgacctgctggacgccggggtcatccgggttgcaattgacagcgttttcccccttgcgcaggcgcagatggcgcatgagcgagcagcgcaggggcatcttgagggcaaaatcgtgctgtcggtgatggactcgtcagccgggtaatccccgacggccagggttgcgtttttgcttctcccggcggcggactaaaacagcgccagccgggcaagacggtccagcgcgttgctcagcgcctcgtcccctgcggtcaggctgatgcgaataaatccttctccccctgcgccaaaaccagtgcccggcgccaccagaatattcgcttcctgcagcagcaggcgggtaaactcctgcgaacggtagccgggcggcacgccgagccagaggaagaaagtgccttgtgcgtcacgcgccggccagcgcagcgcagccagtcgacgcagaacccactcccgacgttgatgatagaccgccgtcagctgcgcaatccgttcggccggcaggttgagcgcggcgatcgccgcatcctgaatcgcgccaaacaccgtgctgtagctatgggtgtgcagctttttaaacgcccggataatcgaggcgttgccgaccgcgaagccgaagcgccagccggccatattaaaggtcttggaaaaagtataggtttccactccccatgctttggcgtcgggctgggagaagaggctcagcggcgcatcgctggccgcgctgccgatggccgcataggcaaaatcatggaggatcggcacctggtgacgacgagcaaactgcagcgcgctggcgaacagcgccggcgtggcgagggcgccggttggattatgcggatagttaagcaccaccagcccggccttgtcagcgacttcccggggaagatcgttaaaatccggcaggaaatggttctccgccctgagcggcaggccataaaacgccgcctgggactgcagcgccgccgagcggtaaatcggatagcagggatcggtggagatgaggtattgcccggggctgagcagcgcccgcgggatgccgcctataccgatatgcgacccctgaaacacggcgacttcgctgtgcggatcgagttccacatcatactgccggcgatagaaccgggcgatcgcctcgcggacctgtggtttgccccagaacgacgggtagccatggttttcacgacgatgaatagcgctctgcagcgagtcaatcacttccggcggggtgggttgatccggactgccgctggaaagatcgatcagcggcagcgcttcggtgttgacctccgcggccagtttttccagcaggctgaacagattctcttccagggcgtccaccagcggcgaagcagtaaaatcaggcataacattcccggtttaaatcacgaataattgaccatctttaagggatttatagcggctggctaaataacaatatacgcaaaagtttcttgtttttaagatatgtcggtatagcaaaagttaatgaggaattagcaaaaggaaattcggcgttctggcttacaacccacagtcggctgtgatttaatcgttcaatatcgccaaccctccaggaaaataccttatgaacaagtcagttgcgcgcgggatcgctctcgccctgttgtcggccacctctttttatgccgccgccgacgctcatcttatccgcgtcggctttaaccccgggccgtataaagaacaatttgagaaaggcgtcgcgccctatttattgagtaaagggtataaaatcgaatataaggatttcagcgacggtattcaggtgaatgacgcggtagcccgcggcgatatcgaagcgaatattatgcagcatccggtatatctgaaagcaattaatgagcggctggggatcgataacgtgggcattgtgcaggtccccacgccgccgatggggctgtatggtgggaaactgaccaccctggggaccccggcggcgggcaccgtcgtgtcggtaccaaaccagccgtcaaatgaatatcgcgcggtactggtgctggagagccttggctgggtgaaaattaaaccagacagcgatccggccactttttcgcagcgtaacatcgtagataatccttacaaaattgtcctaaaagagatggataatgcccagcaggttcgcgctctgccggacgtcgactatggcctgattcagggcaattttgccgtctccagcggtatgtccctgacctcggcattaaagctggaagcagccaccagccattttattaatgtcgtgaccgtcgccggtaaaaatcagaaggcgcagtttgccaaagatattatcgatggctaccactcggccgagttcaaaaaatatattctcagccatccgcagtatgatggttacctgctgcctgactatttaaaatgaataacgcgatgatagaatttcgccacgtcagtaaaagcttttccaggaaaggacatccggttctggccttgcaggatattaatctcagcattgagcgaggcgatatttttggcattattggctacagcggggcaggaaaaagcaccttattacggctgattaatcgtctggaaacgcctggcgagggcgaggtactgttaaacggcgagccgctacaggactgcagcggccagcgcctgcaggccatcaaaaaagatatcggcatgatctttcagaattttaatctgctgaattcgaaaaccgttttccataacatcgccatcccgctgattttacaggggcgcgacaaggcctttatccaggcgcgggtggcggaactgctggcgttcgtcgatctgagcgacaaaatccacagctaccctaatgagctgtcgggcggacaaaagcagcgggtcggtattgcccgtgcgctggccaccaacccgtcggtccttctgtgcgatgaagccacctcggcgctcgacccccacactacggtgcagatcttactgcttttgcaggagattaatcgtcggtatggcatcaccatcgtactgatcacccatgagatgtcggtgatccagaaaatctgtcacaaggtggcggtgatgcaggcgggccgtatcgttgaacagggggcggtttttgatctctttgctcagccgcagcatccggtcactgccagtttcgtgcagtcggtggtgcacgatcgtctgccgcagcgggtggcgtcgctcctgcagcgcgataacggcgcccgggctatacgcctcgaatttatcggcgcgacggcgcagcagccgatcattaaccacctgatccgcgagtatgctgtcgaggtgaatatcctgtttgccagcatgtctgaagttcagggccggattctgggatttatgattgtgcaactcctcggcgagcctgacgaaaccgaccgcgccatcacccatctggtcgatgcaggagtgaaaatcacccatgtttgatcttattgataccgccatcaccggcgatcagtttctgctggcgctgcatgacaccctgattatggtcgccgtctcgctgggctttggcgcgctgatcggcgtcccgctggggattgtgctggtggtttgccgtcccggcggcatcgtggccaacccggtggtgcatcaggcgctgaatccgctgattaacgtgctgcgttcgctgccgtttatcattttgctgattgtgatcctgccctttaccagactgctggtgggcaccactatcggcaccgcgggagccatcgtgccgctgatcgtctttgtcgccccctatattgcccggctggtggagagctcgttgctggaggtggatgaggggatcctcgaggccgcggacgccatgggcgcaaccccgctgcagactgtctggcactttatgctgccggaggcggcggcatcgctgattctggcccttaccacggcgaccatcggcctgcttggtgcgaccgccatggcaggaacggtgggcggcggcggaattggcgacctggcgatcacctatggctatcagcgcttcgacgcctttgccaccctcaccaccgccctggtgctgattgttattgtccagcttattcagacgctggggacccgcctggctcgccggctgcgtcgcgattaatcgctctaccgcgccggggttgacccggctagcgtgcgcagaccgcggcgaaggcgctggctacccgcgcaatattgccgtggttgagcccggccacgcagacccgaccgctggcgatcagatagatgccatgctcttgacgcagaacgtctacctgagcggcgctaaagccggtgtaactgaacatgccgcgctgggtcagcagataggaaaaatcccccgccggcagggctgcctgcagggccttcaccagcgcgacgcgcatggcgctgatgcgggtgcgcatggcctccacttcttcctgccacagggcattcagctcgggatcgttgagcacctgcgacaccacctgggcgccaaaccccggcgggctggagtagttgcggcgcacggtggctttcaactggcccagcacgcgcccggcggcatcggcgttgtcacagaccaccgacaggccgccgacgcgctcgccgtacagcgaaaaaatcttcgagaacgagttgctgaccagcgccgtcagcccggcgctggcgatggcgcgaatggcataggcatcttcatccagcccgcggccaaagccctggtaggcaatatcgaggaacgggatcagctcccgggcgatcaccacctcaatcacccgatcccactgctcgggggtgagatcggcccccgtcggattatggcagcaaggatggagcagcacgatgctgcgcggcgggagctgctggagggcggcaagcatggcggggaaattgaccccgcgggtggccctgtcgaaccagggataggtatgcacctcgaagcccgccccggcaaagatggccacatggttctcccaggtcggatcgctgacccagaccgcggagtcggggaagtagcgcttgaggaaatctgcgcccaccttcagcgcgccggagccgcccagcgtctggatggtggcgatgcgtccggcacgcaacgccggatgatgttcgccaaacagcagggtctggacggcgcggcgatagggcgccagtccctccatcggcagatagaggctggccttttgcaactggctctgcagccggtcagcggcctgacggaccgcctccagctgaggaatgatggcctgctcgttatagtacagcccgatgctgaggttaactttgtctgcccggggatcctgttgaaaggcttccatcagcgacaggataggatcgcccgcgtaggcgtcaacgttctggaacacagtggttactcctgaaatgaccgttaaaggtgaagccattacaccgcatagcgtccggggcggtggttcatggcgataatcgaattcaaaatcacggcgccgaggacagagaccagcagcatcggcaggctaaccacccacagcgaggcggtgacgatgcaggcgtccactaccatctggaatttaccggcgcggatgccgcttttatcctgcagatagagggccagaatattgacgccgccgagactcgctttatggcggaacagcaccacaaagccgatgccgaccatgatgttgccgaagagggtggcgtaataggggttcaggcgatcgacatggataaagtagccgtgcaggtcggagaacagcgacaccagtccgaccgcgcagaaggttttcagcgtgaaggcggcgcccatccgccggacggagagccagtagaagggcagattaatggcgaagaaaaccacgccgaacggcaagtgggtggcgtagtggatcagaaaggccatgcccgccgtcccgccggtcagggcgccagcctggcgaaagaggataatgccaaaggagatcatcagcgtgccgaacagcagcgccagggcatcctccagccaggtgtgggtcagtttttcaggggaaaggacgttatccataaataagcactatcttttcgttaacaaggataagctcttgtttgcaaaaatcgcaccagaggagcgtgccctggcgagcgtttgcggaaaaaatagccgtggtttagcctaacctgttgttctgacaggaagaggaaattgcacgggtcgtgcgttttatggtttccgaatacgtgaattgtgcgaatttgccgcttgtcgcgcattgtctggccccgcgtctgcaccagcgcagggcactgtgccccggttcagcgcagcggggtcgtgcccggcatcagctggccgttctctttaaggcggttgagcacgacggcggttttcagatgggccacccctttgttttgcgccagaatatggctgatcaaatggctcagaccgggcaggtccgggaccgttacccgcagcagataatcggcgtcgccggtggttttccaggcgtccagaatggcgtccacttcactgagcatctgatgaaaactctccacgcattgcggggtgtgattcagcagacgcacctcaatcaggccaagcatctcctgcccggctgcatccggcgccagacgcgcatggtagccgaggataagctgtgcctgttcaagggcgatacggcggcgcgaacactgggaagcggacaggccgataagctcgctcagctcctgattggttaaacggccattggcctgcagcagggtaagtattttcagatcatagtcgtcgatgttgtacatagtggccactagcggaacgtaaaagtggctaccagcctaacagttttttgcctggcgtgaagcctgagcggacggcggcaaaccggatgcaccaaaacgggtcaggttcatgcattaatccgctctttttctcatgatctgtgcgttatctggccagttttcgcgtgtgatgcgccaggtcggcgccgacatgaccagctaccggaactgatttgaaaagaatatttgaatatatttcaattaattaatttttgtctgacgctgcaaggcgctccgctggcctgaaagttgctaccggcgaacgtgactttttacagacaggggcaggtcagagatgacaacgcagcaagagcatcagttaaaacgcgggttaaaaaaccgccacatccagttgatcgccctcgggggggcggtcggcaccggactgtttttaggtatcgcgcaaacgatccgtatggcaggcccgtcggtcctgctggggtacgccatcgccggggttatcgctttctttatcatgcgtcagcttggcgaaatggtggtagaggagccggtggcggggtcgttcagccatttcgccaaccgctactgggggcccttcgccgggtttatgtccggctggaattactgggtgttgtacgtgctggtaagcatggcggagctgacggcggtggggatctatattcagtactggtggccggaggtacccacctggctgtcggcggcgatcttcttcgtggtgatcaacgccatcaacctgacgcacgtcaaagtgtatggcgagctggagttctggttctcgattgtcaaagtggccgccatcatcagcatgatcgcctttggctgctatctgttattcagcggtcacggcggcccggcggcgacggtggccaacctgtggcaggacgggggatttttccctaacggcatcacgggcttggtgatggccatggcggtgatcatgttctccttcggcgggcttgagctggtggggatcaccgcggcggaagccgacgaaccgcataaaaccattcccaaagccaccaaccaggtgatctaccgtattctgctgttttacgtggggtcgctggcggtcctgctgtcactctacccgtggcggaacgtcgtggaagggggaagcccctttgtgctgatctttcacgccattgacagcaatattgtggccaacgccctcaatctggtggtgctcaccgccgcgctgtcggtctacaacagctgcgtctactgcaacagccggatgctgttcggcctggctcagcagggcaacgccccgcgtgcgctgctgcgggtgaaccaccgcgggatcccattgaccgccctggcggtatccgccgtcgccacggcgctttgcgtggtgattaactatgtgatgcccgggaaagcctttgccctgctgatggccctggtggtggccgccctggtcatcaactgggcgatgatctgcatcactcatcttaagttccgccgcgccatgcagcgggcggggaaggtaacggctttccagagtttcgcctatcccctgacaaactggctgtgtctgctgtttctcgccgcgatcctcggggtgatgtatctgaccccggacatccgcatctccgtctgcctgatcccggtatggctgttgatccttgctgcaggctatctgctgcgcaggaaaagcgcgccggcgccggtggcggcgcttgaggagcgttaatctgcgacgccctacctggcggcagggcgatattattgcgctgaaaatatatagcgccaatatataggatggtttatataattacgataaatgataactaacaatatcacgctgaatataaattagaatgtgaggagaccgcgcgctttttattgatcttgcgtaccgctttgctactatccagccggcattgagactgtatttaataatgcctggaaatggaatagtaaaaaccataatggagtagggtatgaagcatgtgcacaagctggcctggataggcctgttcgtcaatattattatctgttttgtcgcgcgaaatttattacttgatgaaggacagctgaacttccatagtcgggcggacggcgtatggtcctggctggtgctggccctgtttattgccgtggtggttcaggcgatcagcataatgctgtcaggccgctacccttatctggccatcgtcctggcgtttgttggcggcatcgtgatggtgcccgccagcgtgatctttctggtgggtagtctgttcagcttgcaaacgcggattaacgccggatttacgccctggcgatcaaccacggcagtgggcgaggctgataaccagcagctattaacctttaatgcctcaggcttttatccccaaggggcgctggcgctcatcgccgggatcattattttaatgattggcatggggataggcggagtatttattgccgccggtattgttgcgctgtgcaatggctatcgtctgcaaaatcgggtggtgattggcgtgagcggcgagtcgatgatatttacgccggggctttatgccgatacctacgttattcccttgcgggatgttgccgtagttgaacgcagcaataatgatgcgaaagtccggctgctgatccgttccagcggcagaagcttcacgttgcgtaaaaaactgctcgccggcgataaggttaatgacgccttcgccgccattctggcaaaactgactaccgtttaatgctggcagaatagagaagccgccaggcggcgcgaggcgtcctggcggtgaaaggtggggttagcctgcgcggctaccgcaccagcttgtctcttacgaacagcactgcctgttaatccacgttagtaaaataatcgcgcgcggcggtctcgacgcgtttcgcatccagcccggtcttctcagtgatctgttcgataaacgatttaaatttttcgctcatcacgttacccccttcccagtgggcgacgtaaaatttgcactgatagcgataaaaatggagagtggtatctcctaacgtgtaatacatgcgcttctcctgtccggtagtacggttgccgcgtccacagcgtcagcaacctctttctcattacgatcgatctgcattctatcctcctcccaattggctgaaatttccagcggtgctttgcgccatggagcaggataaagcaatgttaatctgcggatagatagtgattttttctaaggtggcgcaaaagtagcggttacctgcgggccgcgcaggtaaccggagaacagggcggattagcgcagcgtgttgcgctcgtcgtcggacaggtccagggtctgcaccataccactttcagcagagcgcaccgccgcttccagaacggccatcaccgccagcgcttccaccggcggcaccggattggcgatctggcccttcagcgcatcgcggatcagcatatagtactggcgctgatcgccctgcggggtagcctgcgcgtgggcctgcagcgaggcatcatagataaccagcgggtcgtcatcctggccccagtcggcgctgcccggtaccacgcccgccagcagctggctctcctgttggtcggcccgcgctttgataacgctacctttatcgccgtgcacggtgaagcgcgacgagccgcccgcgaccagcatgctgcagtgcaggatcactttatgcgccgggtagtttaataccacatgcgcccagtcgttgatctccgccccgtcgcgcagggtggctatgttaccttgcaccgactgcggcaaaccaaatagctgcagcgcctggtcgatcaggtgcggccccaggtcaaaccacaagccgctgcccgggacgttctgctcgcgccagcgcacgcggacttccgggcggaagcggtcgaaatgcgactcgaaatgtttcaccgcgccgagggtgccttgctcaatcacctgacggatcccgagatagtcgctgtcccagcggcggttatggaagacggagagcagacgctgtttctcctccgccagggcgatcagctcccgggcctcctgcatatcgagggtaaagggcttatccaccaccacatgtttgccggcgttcagcgccagacgtgccagcggggcgtgcgtggcgttaggagaggcgatgaccaccaggtcaacgtccggatgctggaccgcagcttccggggaggcgatcaccgtgacgtccggcaggtcgcgtttgaccttctcttcatcgcgggaagcgacgaacgccaggttcagccccggcaccgaacggataagcggcgcgtggaaggtcttaccgacgaatccgtagccaatcagggcgatatttatcgtgttgttactcatcaggttctccacgttgttaagcgtcagcaatatgtacagagagggcggggtcatcccccagctcagcccagggacgatcaagaaaaagatggtgaatgtcgctgagtccggccacccgccacggttcgcagcggttgagtttggtatggtccgccaccagccagtgctcggcgctggcggccagcatggcgcgtttaacgtcggcatcagcttcctggctggcgctcagccccagcccggcatggagcgcgcaggcgccgagaatggcgatatcggcccggtagcgggtgaccagcgacagggtggcgctgccggcgaacagccgttgtttactatcccactggccgccaagcaggatcagctggatatcggcacggtcgctgaacagctgagcgatatccagagaagccgtgatcacggtcaacggccctttcagctgggctgccaccgccaacagcgtgcttccggcgtcgagaaacagcgtcgagccagagggaatgcgcgcggcgacctgctgacccaggcgctgcttggtctgggtgagaagagcgtttctgccctggcgcgtcatggccgggacgttaagggcgatggccccgccgtggcttttctgcagcacgccctgttgttccaggtcgctcagatcgcggcgaatagtatcggccgacacctgcagctctgcaaccagttcgctgatgctcagctgaccggtttcgctaagcctgtcgagaatatgtttttgcctggcgagcttatgcatggccattgactccgcaaattaacgcaataaacagcataatacagcaagaagttgcaaaataaacggcaaaacgtcgctctgtatgtgttgaatcgtgaagaacttgatttcactaagttttaacgttaaatgaggtgagcgccgcgaccgggggcgaaagcgcttttcaatgaagcgactaggcctgtatttccgggttattaaaagcaagaatgcgcgctttcgcgtaccttatagagaaggcgcgtaatttagcagatatggattaacggaggttgagtggacgcgattaaaggctcggagttgcagataccggacgcgatcttcgcgtgggtgctcgacgggcaggggggcgttaagccgctcgccgatgacgatattatcgacaaagacaagccttgctggctgcatctcaactatacccatagcgacagcgccgactggctggcggccaccccgttgctgcccaataacgtacgcgatgccctggcgggagagagcacccggccgcgggtgacgcggatcggtgacggggcgctgatcaccctgcgttgtatcaacggcagtaccgatgagcggcccgaccagctggtggcgatgcgcctgtatatggatgagcggctgatcgtctccactcgtcagcgcaaagtgctggcgctggacgatgtgctgggcgacctgaaggaaggtaatggcccgacggacggcggcagctggctggtggaggtctgcgatgcgttgaccgatcatgccagcgagtttatcgaacaactgcacgatcgcattatcgacctggaagacgacctgctcgatcagcaggtgccgccgcggggatttctcgcgctgctgcgtaagcagctgattgtgatgcgccgctatatggcgccgcagcgcgacgtttatgcccggctggccagcgagcggctgccgtggatgagtgacgatcagcggcggcgaatgcaggatatcgccgagcggctggggcgcggtctggatgagatcgacagctgtatcgcgcggacggcgatcatgagcgacgagatcgcccagattatgcaggagtcgctggcgcggcggacctataccatgtcattgatggcgatggtgtttctacccagcacctttttaaccggcctgttcggcgtcaacctcggcgggatccctggcaacagctggcatctggggtttagccttttctgcttgatgttagtcgttgtcatcggtggtgttgcgtggtggttacatcgcagtaaatggctgtaaagaatcgccttttagcggctgtagtgccgggaaaacccggcaatgtttgagcgaaatcaataaaccatctacccattcagggcaatatctctctcgcaggtgaatgcaacgtcaagcgatgggcgttgcgctccatattgtcttacttccttttttgaattactgcatagcacaattgattcgtacgacgccggctttgttgagtcggctttttttttgcgctctccggaccagcttctacccttactaagacacccgacggtttctggccgttgacgcctgcgggtacgcccgtatcactctccgggaggcctcgatgtattacgcttcagagctgacagcccagtctatccctatctcgcccgagccgaacgatccggctcctttacccgatccacgaccgcgtccgcagccccagcccgatccgccgcctgacgaagagccgattaaattgtcgcatcaggcgcggagatctgcgaggatacgcgcctgcagattgtctgccttttaatacgagaatacattgtgaccgctttttctaccctgactgttttacctgccgcccaattagccaaccttaacgagctgggttatctgtcgatgaccccggttcaggccgccgccctgccggcgatcctcgcggggaaagatgtgcgcgtgcaggcaaaaaccggcagcggaaaaacggccgcatttgggctgggtctgctgcagcatatcgatccggcgcgcttcgagacccagtcgctggtgttatgccccacccgcgagctggccgatcaggtcgccggcgagctgcgccgcctggcgcgctgcctgccgaacatcaagattctgatgctctgcggcgggcagccctttggcgcccagcgagattccctgcaacatgccccgcatattatcgtcgccaccccgggccgtctgctcgatcatctgcagaagggaacggtctcccttgacgcgctgcagaccctggtgatggacgaagcggaccgcatgctcgatatgggcttcagcgatgccattgatgaggtgatccgcttcgcaccggctgaccggcagacgctgctgttttctgctacctggccggcggcaatcgcggcgatcagcggccgggtgcagcgcaatccgcagaccattgagatcaacactgtcgacgcgctcccggcgattgagcagcagttctttgaagtttcccgccacggtaagattgccctgctgcagcgcctgctcagccagcatcagcccgcatcctgtgtggtgttctgcaacaccaaacgcgattgccaggcggtctgcgatgcgctcaacgccgccgggcagagcgccttgtcgctgcatggtgaccttgagcagcgcgatcgcgatcagacgctggtgcgcttcgctaacggcagcgtccgggttctggtggcgaccgacgtcgctgcccgcggtctggacatcaaatccctggcgctggtggtgaatttcgagctggcctgggatccggaggtgcatgttcaccgcatcggccgtaccgcccgcgccggtgaacaagggctggccatcagcttctgtgcgccggaagaggcgcagcgcgccactattctggccgacatgctgcagctttccctgaactggctgccggcgccgacgggcaacaccatcgcgccgctgacagcggagatggcgacgctgtgtatcgacggcgggaaaaaggcgaaaatgcgcccgggagatgtgctgggagccctgaccggggatatgggctttgatggtgccgatatcggcaaaattaccgtccacccggcccacgtctatgtggcgatccgccagaatatggcgcagaaggcgtataagcagttacaaaatggcaagatcaaaggtaaatcctgccgcgtacgactgctgaagtaagggcaggagagtgcgtctcaggcggctgcctgagacgcgtgagggttatttcacttccaccacgttcagacgcagctcatcgagacgggcgtcttcttcttccggctgccagccggcgggctgcaggggaatatcttccctgtcaaacgccagatcgccaccatccaccacctctgagccgtgggtgatacctttaaaatcaaacagattgacgtcgctcaggtgcgaaggcaccacgttctgcatcgcgctgaacatggtttcaatgcgcccaggataacgcttatcccagtcgcggagcatatcggcgatcacctggcgctgcaggtttggctgcgaaccgcacaggttgcacggaataatcgggaagcctttggcctgggagaagcgctcgatgtccttttcgcggcagtaggccagcgggcggatgacgatgtgtttgccgtcgtcgctcatcagcttcggcggcatccctttcattttgccgccgtagaacatattcaaaaacagcgtctgcaggatatcgtcgcgatgatggccgagggcgatcttggtcgccccgagctcggtggcggtacgatagaggatgccgcgacgcaggcgagagcacagcgagcaggtggtttttccttccgggatcttctctttgacgatgccgtaggtgttctcttcgacaatcttgtattcaacccccagctgctccagatacgccggcagaatatgctccgggaaccctggctgcttctgatcgaggttcaccgccaccagcgagaaggagatgggcgcgcttttctgcagattgcgcaggatctccagcatggtatagctgtccttgccgcctgaaagacaaaccataatgcggtcgccctcttcaatcatattgaagtcggcaatcgcctcaccgacgttgcggcgcagacgtttctgcagcttatcgatgttgtatttctctttctttgtaagctcttgattttcttgcattattaacattctcaaaatctaaaaggggcatatagggggcaaaatgtgttaaagcccaagccgggaattcaacatagaaacctggtcgccgttcatctcttctatccatgtactataaacgtcgtacaccatttgcgcgttttcatgccccatctgattggctataaaagacgggtttgcgccagccgtcaggagccagcaggcaaaagtatgccgcgtatggtacggattcctgcggcgaatgccagcgcgttttactgcagcttcccatctgctgcctatactgctgtgcgagtagcagggtttttgctcgcctttccgtctccgcggcatgaaaacaaatcgcaaattctgttcctcgcttgagccgtattccctgtggtgaaacgtgatagtggataccggatgtccagctgtcagttcatgctgcgctttcagcgcgtccagggcagggctgagcaattgtatcgtccggtttcctgccgctgtttttggtgggccgaacatgccgtttgctgtcagattccggcaaacgtgtatcacgcccttatccagatcgacatcttcccatgccagagccgccagctcaccatgccgcacaccagaatagacggcgaatttccacatgttctggctttggcctcgttcgcttgccatgagggctgcaaattcctctcttgtaagtgggtcaggcttaacccttgttttacgcaggctttttacgctctcaaatggtttatgttggataaaacccgatatgtacgcaaaattaagaatagagcacagtaaagaaacataattgttgacagtcgaaactgttctgccttttttattttttcgcttgttttttgaatagaaggtttctcctgttagcaattcgtttctacaattaagaacgtcactatatccaatagcagtgagcatagtgtttccgttcatgatttttattattgtatcaacctgggattttgttttcttaagagtattggcgctgatttcagtttctttaattttaagccatagttcacacagttcacgaaatgtgctcacgtgtaacgtggtgttaatcgctactgcctttttggatgaggggaatcgacgcccgtaatcaaattcccccatgtttatttcgctggtaattaccgctcttaaattaccagctttttttatgtttgcggggcttacaatccacccctttaacacttcgcggcagcgcttacctttatacataaaccagacgcatattctgttaccacgaatctctacgcctgtaggtagtgttgccatttacgaatcccggataaatttattaatttccggatagttgtaccaggtagtcccgcgcaaagttttttcgccagaaggggaaactcttttgaagtgaacgccttctatccaggctccttgtcggtaactttcaatctgccgggctccaaggccagttcgtgccatcagagccttttcaaccatccactcttcattaaaaatgatctgcgccatataaacctctctggcgacatgccgagtataagcatgcgcgccgtagtggattgataattcgttatcaggcgacctgcccggggagagctctcaaccggcgcatgccggtcatagctgtggccacgtaactcgctttacggttcaccacctccacccagacctttactccttcaatctgcaccgtatacgtctctttcatctggctgcgtccgtaatcgccataacgttctacgtgcttagccagcgccgcatcacaggcctggcggcccagcggtgattgtttgcttcggttaatcagtcgcatattcacctcacacaaaaacatcaactggatcgccagctgcgcgcgcgttgtcgttcgcttcccggcggaggccgagaacatagccaacgggatcccaacaggacaggattgcattaagttctttctggctgtgcaaggttgtcaggcgttttttaagctcggtggcgcaggcacgcaggttcgcccgggtggggcctgccatcttcatgcacaagcacaatgtcagaagcagatccgaatattcgtcggcggctgcgcgcaatgctgccgggtcgatgctggcttccagctcgggcaggcggtgtttcaggctcatttggcacctcccttacgacgaagagccattctcaatctgtttttcaccagtctggctttgcgttgtgcgggcgtttcacgttcgcgagcgcgcgcattagattcacgattacggcggcgcctggcgttgagtgattcgtcttcgcttcgtatatgcatccgaggttccccgtcctttggctcaggccactggcgcgctttatttaccgcgagcttatcgatcatcgcctgggtaatctgctcgtcagtgattcccgctctgcgctgggcatcccacatcaggaactgtatatcagcccattcgctgtggtcgttaggttccgcggcagcttcaagcgcttctatgctgaggtgtttcagtggaccagctggaccaacattgccgaaggtggcatgtgaccattcagcgtgttcgcggcgaacctgaatgcgagcaaatgagaactcccccatcagcgcagccaatgcgatttcagtaatacgcaaatacatggctgcgcgggacggattactgaattcaccctcttttaaaaacttcgacatttccgccacgtcagcacggcacacggcgattaattgctcattagtgaatgtggcgatatcagtcattccaggcctccagctcgttctgaatttcgtcgtcgatttcgtcgttcgtggcttcttcattcaggtagtcgcgagcttctttgagataatgctctcgacgcccgtcgtaccatgctgagaactctggcgaccagccattcctgtcacccacatcagcgaaaaaatcgtgcattgcgttgttgtaggccaagttttcaaccatgcaatacgccgtagtcagtgccgctcacggatgtaaccgcggagatcgcgcttgtgccagtaggggctatatttcgaatcgcagcgccctttgaattcaactttccagcggcgtatgcatcgtgcgttaagtgatttgctcatatcgttatcgggagggcgaaccctcccgcctcccttagcccacgtattccggtttcatgtcgtccagggtgatgcggaactggtcatacagttcatcaccgaggtggcggcgcgatgaggtcaaggtgctttctgccttcgcgaataatgcttctgcttccggatccccggggttagggagtgaatttatggctgcctcaactttgttctttgcatcaacaaggtagtagcgcttcaccgccttattcttcagttcggtatacagggcggtaccaagcagagctttctgtgattcgatgtctgcacgaatggctttggcctggtcaacagagcttgcggtatcaatgcggtcgcgtaggtcgtctgcaactgcgtcaacattagttgctgattcctgcgcggtggcaaggatgcctgtttctctggtgatctcatcaacagtcattcgctgggttggatttatttcgcgctcaacgcgttcctccaactcatcaggggtgtagacccccaaaatcgcccatggtgtgtaggcacgagcccagtatttcacttgcaagtagccaatttgctgctttgggttacttttccacaggggcgagtttttgattgttacttccgaaacgcagagccattcattccatgtaatgtctttctctccgctaatgactgcgccaacacggcactccatcagatccttttcgccacgatattcataatggaatcgcccccgtattgcgccggtggcagtcagtaccgcgctaactaactgagcttcatatcctagagtgccatttataacgtgtgttttctgaccgactacgtaggggtccataccccatcgcgcggcttgcatgacaatggcgaggcagtctgatggcttaccttgaagatgtttgggcacagtagaaataccctgggacataacatcagcaatcttcatcatgcgatccatgacatcgccattcagcagtaacgagccattattcattgtgctgggtgcctgctgatcaattaccgctatgtttctattttccatggtgcttcccccttatgcctgtacgcgcagcgcttcgagacggcgcacatcaaaatcgttaagttcttcggtgtagtcttcggtaatcggcgccggccattctccagtgtcgaaaccgttcgcgatcgcgcgcatagctttgcggtattccagcatgccgagttccagcagttcttcggatgcctcgatgatggcgatccagtggtagttctcgtctttgttgacgaaaatccagtagaactgatcgagtgcggcgacatcgcagtacattgctgcgctcaggtggtagtcgcggtcgataatttccctgtgcagcttcgcgcgcaggccttcctgcttgatgttccacatgctgatggttttaaggtccgcaccgatgcgcaggccgcccatgtctatctcaaggtcaggacgcacacgaacttccagcccggtttcctcatcaatgccgaaataactcacctcgacggcacggctcgggtgcgtcaacaacttgccggcggtagggtgattcaacagtgctttctgaatggccaatgccgtagccagctgctggcgggtaaccagcacttttccttcagggttctcgcgccatgcatccagcagatcatcggcaaacacggcatccggtttaaccgatttcacggcctgaatcagatccgtcttagtacctgatactttcagcggctgcgccttctgcgcttcctgagcaaccatgtcaggattaataagcgccagctgttccagcatggcatcacggctgccgctggttttaacaggcgctggcagggtggcgttgtattctttgatgcaggccttcattgctgacgcggtaaagtttttatcgtcaccaacgattcgcttgaactcgtcaggtaattccagatacgcaatgccaattgcatctttgtcgccgcccagcggtacaggagcgggcagggtggcgttgtgcgcctccaactgcgtcttgatatcgtcagcactcaacagcggcggaagcccggcgttgtactcgtcgataaacgcgcggatcgtcgcagtcgtggtgaaggcgctttccgggatttccggctcgatgctgaattctttttccagctgctcaggctgcagagccagtgcatgcaccaggttgccaatatccagaacaggggagcgtaccttctggatggttttggatacgtggcgcgcctcgaaatacatcagcgatacccgggcatctttaaccatcgtggagctgatgccgttagcggcgtggtagacctcatttggcacgccttcatatcgaccaggctcgaaatactccggccatgctggcgctgcttgttcagcctcttcctcttcatcgctatgagcactctcggaaacctggcttttcagcacttcgtcggtaagatccgggcagcgttcagccagtatttctctcatgttcacggcagttgtttgcgcaggaggctcatcagcgccttcgcctgctgataccgcattatcattttcgtcttcgaccggctgagccgtttccatctgcacattgctggtggtttccccggaattagctggatgtaatttttcttctgcagcgcgctggcgcgtctggtccacgatagaaagtgctggtgctggtgctggtgctggtgatgcctggctatccatcagaccatcaatcgaaaaaacaccattgcccatgtttgaaacttcaggctgtttgggcttggtcaggtcttcggttatccacttcggatccgtggggtcactgataccttcgacatattcgccgcgttcggcggccagaacctgattagcgtcagggcgtttcttttgagcttctttcaccagttcggtgccaattacctgaaagtcagttgggagagtttccaggtcaggcacgccttcatctccatcgatagccttttttacagcgtccagagtgacagcggcagatgaaacatgaccagctttctcaagcgtctcagcagaagggacgtcatgcttatgctcggtcaggttcgcattgatataggtctgcagacttaccgggaaatgatgaatatcgctggtggcgccacggataagggcaaaaatcgctgcgcgggaataatccaggatgcctgcgaccttgcgcagcgctgccgaccattctttgaacggactttctttcttctggacgatctctttggcccggcggtgaatagatgccgggaaattgtatatatcgaaatccatcggcattgtggccagggctatttcaacatcgagcgtatcgagggtatgggtgtagtcaggattgcgatcggttttattaccgccgccagcattcgtacctgcatcagttttcataactgaagaaatgcagttaccggcagcccattccctggtgagaatgccgcggtcgatcgcgttagtggcaaaccacagctttgcaaactggatacgcttgccgagctcatgccgcttcccttccgggaagacttttttattggcactggtgaatttccagagcgccggcatatcgtattttttgatttcagggatattctcggcggccagaatcagatcctggacggctgcgttatcagtgtccatttcaagaactgacagctcctgccggtgaggcatgctgatatgataaacgtggcgttcttctgccatatactgcgccagcagctgagcgcgaaaggggagttctgccacgttaaaaagcgcgctcgaatcgtcctggtattcatcgctaccgaaagtttccacggtctcaccttgtgccgcgtcaccagtagtattggcatcaaccagctcgccactaacgggctcagcagatactccggcattatcgatgtgatgatccgcaggcgcctgacctggcttcagagcccaggtgcggccatcgtcgccgagctggtagcgttcgcaccatgagtaatcgagaagaccttccgccggcaggtcattgaataccgggaaatcggtacgaattggtttttgatagtctttgccgcggcctgtttcgatcccagcgtcttccagatcgacgtcgagctgcagtagggcgcgagcttctgatttattagtgcgccagattacggcatcagctttacccgatttttgagtcgcttttatcagataaaaatattccatgtgatagcctctattttggatgtagaatcccccgggccattggtagcgcccatttagggtggtcattggttttggtaatttccggtgtaactttggtcggtggcaccggacgtacagcccgcttcggcgggtttacgttagccctcgtgcgccatctggtcgtaagaggcgcagcgttcagagcagtactctttttctttccgtgcgagctggttcccctggaggtacaacagggtgctcaccactggttttccctcgattgctttacggcagtaaccgcatttcttctgcattccttcccccttcatttgcaccgtgaacccggctggatgctcgtccagtacacctttcagtggataacattcagctttaacgtgttgctcttctgcagctgccttgcagtcattctcagtgtcgtaaaccccgagcaggacatcctgattaccgcccgtcagcatgctgacggtgagaaccagggcaaacatcgtgctcatgaagggtctcctttttgcgcgagcatgtagcacacccggcggatgaaagttgacagcggacttaaacgaacagcttgctgacgagcgggtttgcgtgcgaaatcattcatagaaacaatccccccagtgcgctgaaaagcgcgatccagatgatgagcccaataactgccgaaatgaccagggctttgatgccttgcttgctcattccaattcctcatttatgcctgtcttttaaccacttcaggctcggtggtatgctggtagttctcacacagccagcaaggaaataaaaatgtcaaaactgacaacgatgaaagttgcttgccctgattgcggaagcgagatgctcaagcgtcccgatgatttcgactttgatacaaattttgttggcgtcagttgtgccaactgtggtcgagaaatcactaaggacgatgtcgttaagcaagggacggatgttgtcaaaaagcaggttgacgacatcctcagggatgccttcaagggaacgggctggaagctcaagtaaccccagtagttcctcgacctgattgattacttccgtggcgtttatttcgagttcaataggcgccacctttaccttactcatctcaccctcattgccttatcgccggccagcggaacgtttaaacctactgcgcgttgatctctccacctcatccggtgtttcgtatgccgccggcagctacttcgtgggctccatgcctgggtggtttgttgctatggggtaagtaaaacattgctttactattaagtcaagttaaggtgatctgatttgtaaggtaatgctgtacctatcggcgatattcatggccttagtcggcatttcatgcatgtggcatgctcaaaaaaacatcaaacagggtgactggtatggacgacgaagaagccgcacaactgcgctatcaggagatgtgccgtatcgttggggatgttgtgtttgccatgatcgccgaaggtcacgaagccaggcgggtagccatagctgacgtgataagaacggagatttcaaaggggattgataagtgggatttagatcagattcaggtgatggaactggcggtgaagttgctggaagagtaggacaataaaaacccggctcggtggccgggttttttatagattagcgtggttggtaaacttgtgctgttggtccatacgctaaagtaaatttgggtgcatttaataatcctaaatctttaagattttcaatcatttgtttctggttgcggctaacagaaacctgcttcaattccgcaactttttcatgcattggtttcgcctgaacacgagtcatctggcttcctctgttaaaattcttcgctgacaagattaaaaaggtacagaacttatagctacgatttctctatttgtcttatacctgaattcattcaacagcttatgcaactcgtttattgctaaacgcatatcatgctgttcggtgtaatcttctatctttagccttagatcataaactatagtattgattccgattgttctgctgtgagagtgccattttttattgtctgaaagtacagtagcaatctcccgggctcgttctatcttttcatcttgtgttacaggctgacccagttttgaaacactagtttcatgaacctgccagtcacgaaatttatattcaacaagccatttttttagcagatctttagacagttctcgggcttcttcgtagcgtcttagctcagccaaatccaaattattgaccatcattaattcggcctgagttatggagcctgaggctgacttctcgattatttcttcaactttgtcaagatagcctaaagcaggcacccatttaccatctgatgattgaacctgtggatctattgggcctagtgaagaagcatagtccatgtaaattttatcaccagacatgcaccaaatcgttccagccgacatagcgctatcgggtacgataaaataaacctcatggtaaaaatgtctagtaatttcgaccattttttctacagactcaacgcttcctccattggtctgcaaaagaataactaaaaagcggtgttcgcgctgtaatgctgaagtgccgatatcttctataactggttgatatataagctttgcccagtcagtaatcccgccatagtatgtgatgatgtcacattcttggaaaaattgttccctgaattcgctgagcttgtattttatgtacccttcaagtgtagtctctaagttatccataatttttcctgaacaaccctggtaaaattttaaccttctgttcttatgacagataagtgccttataaaattaaccacttgattttttttgattttgtacaacaagcaggcgtcaggtgcgggtctaacataagaaattagcgactgaaagttacttttcgtaaaactcaatagcttagtcgctatcgcccttaatccgccgccccatgtacttcgcgtacagttcgtcgagctccttcagtcgcagagatacgatccgcaacatgttctgctgctcttcttccggcaactgacgataaagctcaagcaggcgctgttcgtcaggtttaagaccgtctttctcaccaacatcttcacccaataaccaaggcacagaaacgccgactgcatcggcaattgctagtgcagactctttgctgatacggcctgttttgaaccagcctgagactgcctgcttactgacaccagcaattcgggacatctctgttttggagattcctttagcatttaacgctgtcagcctggctatcaggccttctgtcggatttttttcgctcatggcttcattgtaaataattgctttactcctagataggcatgcatctgttgactggtttgtaaattgatgctttactttgcgcatctaaggaggtcctatgactggtattgaaaacgctattcaacaatctggttctgcaagtgcgctaggtttggctatcggagtaaccaaaatggctgtgtctttgtggcgaaagaacggcgtaccgtcctctcgtgttattcaaatttacaaagcaaccggcgtcacgccgcacgaactgcgcccagatctctacccaaacccgaccgacggtctgccaaaacaggaaggctaaccatgcacactctttcttttcaacaaagtaccggattcaacgccggcgctctgataaagcgatatcagccgatagtggcagagcacgacaacattcgctccgccgttcgcgcctgggcagcggctgaaggtcaggatgttgtatctgcgtacatcgtcgatgagtggcgacagcagggcggcgaggagatcgcgtttcctgatgacatcagccgagcccgacaaaagctttttcgctacctggacaacccggccgagtctgagcgctatcgcgagtacgttcgccttcttacaccggcgatcatggccgttcttcccctggaataccgccaccgtctattgcccgtagacagttttatgtcccgtctggctcgtctggaaaaagaaaccagcgaagcaaaggttgccgttgctatgggggcaccacgccatcagaagctgaaagaactgagcgagggaatagtcgagatgttccgcatagacccggagttaacagcgccactgatggccattgtcacttcaatgctgggagctctgtaatggggaatatcaaaaaaggtgaaagccgcggtgctgcaacaccaacggctttcgttgcgaattaactggatcaattcacaggggaaattatgaacactcaccaactgaatatcaataacgggggcgcccatggctaaaaattcgaaagacgcttacggcgccagcggcaaaagcaatgttctttttttcgaaccggaaagtttgcatctggttaccgatacaacacacccgctttacgatgaacgagtacacctaccgcttaatgaagctgtgatcctcaacatcatggagcttggggtactcgaaccgattatcgtgtggaaggacccggagacagggaaaacctgcgtggtagcaggtcggcagcgcgtaaagaacgctaaggaagcaaatgccaggagaaagcgggcagggctggaaccctggccggtacccggtatagctaagcgcggctcggcaattcaaatggccaaatacatggtcagcgaaaacgagatcacgcaaccagataccccactgggccgggcaaaaaaaatggttcagcagatggaatacggtcatgacgaaaatgacattgccctgctttttggctgcagcgtaaaaacggtccaggcaaccgtggctctactggatgctacgcaggccgtccaggcagcggttgaggctggaaaagtcactgtcactcaagcgcgtcagctggtcgatatgccaccgcaaaagcaacgggaaacggtcaaacagttagaggcagctgcagagggtgtaactggccacgagaaagctcgccgccagcgcgctgtcctaggcgacacaaagccgcgtctcaaatcccgtaaggaaatcacccagcaacttcaaaccgccagtggcgaatacgctgaggctttgcggtgggtgcttggtgatgaaaacacaccagtttaagcaacaacggggtctctatgcgtgattacggcaaggtgcatacatcattttggataagcgatggaatgcgccgggtatcggatgatgccaggttgctggcgctgtacctgctcaccgggcaacacacaaacatgatcggatgcttcaggctgcctgatggatacgtttcggaagaccttgcatggactcctgaaagggtttcgaaagggtttgatgagctatcggctaacggtttcgcaacgcgtgattcgtcatcgaaatgggtgctaattcgtaactttctgacctggaattcagttgaaaacccaaaccagggaattgcagcacttcgtttgtttgatcaggtcccggacaaatctacggtgaagccagagctggcgcgggttttagcctcggcaatatcccacatcggcatcgcaaaactaaagggttccgaaagggttctcgaaccgttccttaaccaggaacaggatcaggagcaggaacaggatcaggaagaagataattcggggcatggctccgccacacccccagcagatcaaaaccaggacgaaagcgataaacctgattcccaaaaaatatacccgaatgatttcgagcaggtctggtcggtttatcccaggcgggcagggggtaacagcaaatccgatgccttcaaagcctggaatgcccgaatcagggatggaaccactacggcggaaatcttcgcaggagtggagcgttacgcagctttcgttaaagccgagggaatccttaacacgcagtacgtgaaacaggcgaaaacgttttttggccctggtatgcatttcagcgaaccgtgggcgattcagcaggcgccaggagcacgagatcccaatcagatttcggaacctgacaaaaccatcccatcgggattcagggggtagcgatgaaaaacatgattggtaccgggaatgcactggagcgactgaaaaaactcattccccctggcgttcagccaaaattcggcagcgttgatgaatggcgtgcctggcaagccgaagaaggccgtaagtgctgcgaggaactggaaaaacaaaaccagcgcgcacgtgcagagaaaatctttggacgtgctggaattcaggatctgcaccgcagctgcacattcgctaactatcaggttgagtcggatggccagcgtcgggcgctctcgatggcgaaaagttatgcgcagcatttcggctctgggtttgcgagtttcgtattcagcggagcgccgggcaccgggaaaaaccatctggcggcagcaatcggaaatcacctgctggctggtggccgctctgtgctggtggtgactattcctgacctgatgctacgtgttcgcgagtgctatgacggcgggcagtcagaggcgtcattgctggacgatttgtgccatgtggacctgcttattctggatgaggtgggtattcagcgcggaagcagcggtgaaaaagtcatcctgaatcaggttatcgatcgccggctgtcctccatgcgacctgtcggcatcctaaccaacctgaactatgaatcgctgaaggacacactgggtatgcggattcttgaccgtctccagatggacggcggtatgtgggtgaattttgaatgggacagctatcgcaaaaacgtgcgtcatttgcgtgtcgttaagtgaggtatgtatggctagagcattgtcagcagttgagcgcagagagtacgtccgtgcagtgattcggatcaccaggcatcaggggcgactcacgaccgccgaggcaatgaaaaaactgggcctgagccgcgctactgttcagcggtatttttccgaagcagaagcgactggcgaggttgtccggcatggtcgcttggggttgttccgcgatcagcgggccgttatcgactttgacatgaagcggtttggcctggtgccaaaaacggctgttggtatgaactacagcctgctgggcagtcctgtatttcagcgtgttctggatgtgcaggaagctatctgcgcaagtaggccgacaactgcgcgcggggaggccttatgactatcgagaaaactcatatcggtattgtgattaccaaagacggaccgaaacgtaaaaagctgcacgcgacggaaagtatgtgggtggtgggaaaaaacgagttttaccacaaagataccgggcgccggcactttgccgagaatacgcgccgtcggcttttgctggaaacgattgagaaaatcgggagcaaattatgagtgaagtcacagtgaagttgacgaacaaagcgatcgcaatcattgcggactacatccaacgcgccagtaagaacgagcagctgcaggacgcaaagaatcgtctggataaaaaaatagcgatgctctctgaagacgaaaactgcgatcaggagctgttgatggctgcattcgtaccagcgatgacaaatcatacccgtgatggtttttttgaagctattgcggttgctttggaaggagcgcaggcatgaacaaggaaatggaaccatcgctgcagtatgcctgcaaacgcattctagagctggagcagctgctgctggtggatgtaccagaaactgtatggcccgctgaagtaacgatggttttctctgaagtcgaaaacgccggtgaattgccggcgcatcaccaacgccgactgcatcatcatatcaaccgtatgtggttggagaaaatgccggtatcgtcaattatcgccgcgactcgttcgttggcctgcgccatggggaaatacgcgtgagagaaatcatcgttgataactttgctggtggcggtggcgcctcaacggggattgagttggcgataggccgcagcgtggatattgcgataaaccacgatcccaacgcggtagccatgcacactacgaaccacccggatacgttgcattattgcgagtcggtctactctatcaggccaaaagtcgcgaccgccggccgccgcgtcggtctggcatggttctcgccggactgccgtcacttctcaaaagcgaaaggcgctaaacctgtagaaaaaaccattcggggccttgcatggatcgtcatccgctgggcgctagacgttggccctcgggtgatgatgctggagaacgtcgaagagtttaaaacgtgggggccgctgctagccgctgaaatgcgtccagacccggaacgcgtcggggaaacattccaggctttcgtcggcatgctgaccactggtattccggcagatcatcccgctctgctcgagtgctgcgaatttctgaatatttcgcttgatagcgaggatgccgcccggctggtaaacgggctggggtacaccgttgagtatcgcgaattacgcgcctgtgactacggcgccccgacaatacgaaaacgcttcttcatggttatgcgccgagacgggcagccgatagtgtggccggaagccacccacggggatccgaaatcaccagcggtgctggctggcaaactggcgccgtggcgcacagctgcggaatgcatcgactggtctatccctgcgccgagcatattcgaccgtaaaaagccgttggtagagaattcgctcaaacgtattgcccgcggcattcagcggtttgttatcgacagtgcttcaccgttcatcgtgaagtgcaaccacaccacgaccaaaggaaaatatgactgtttccgggggcagtcgctggcggatccgctgcagacgattaccaaaacccacggctttggggtggcggttccacacctgacaaaattccgcaccggcgctaccgggcagccagtcaccgagccggtaccgacggtgaccgctggtacgtcaaaacgcccgggcggtaatgggcatgcactgggtattgttgaggcatctctggcgccgttcctggctggtaatggaggcagtgagtatcaggctaaaccgcgcccgcttgataaacctgctcacaccatcctgaaagagtcgcgagcttgtgttgttgcgccggtcatcgctcgtcagtttggtaacagtatcggacatcgggccgacgaaccccgcgcaactatcactgctggtggcggcggtaaatcgctgctggtatccgcattcttggctaaacactacggcgggaattataccgggccaggtgttgggctggatgagccagcacattcagtgacgacggtggatcatcatgcggttgttgcttctcacctggtcaagctgcgtggaacctgccgtgacggccagcgcgctgacgaaccgatgccgaccatcaccgccggcggccagcatgtgggagaggttacgacactggcagtcgaggactacgacgaagagcgcgcaaagcaagtgctggcgttcctgcgggaatactgcggggagaacagcaccgggctggtggatattgacggggtgacgttccgaattgttgatattgggatgcggatgctgcaaccgcatgagctttaccgggcgcaggggttcccggagtggtacatcatcgatcaggattaccgcggtgtgaagtatgcgaaggataagcaggttgcacgctgcggcaatgccgttccgcccccattcgctgaggcgctggtgagggctaatttgccggagatgtgcctgaaaaaagacattgcagcatgataaagcccgcttcggcgggttttatcttttatggcgaaaaattaatccaacaggagaatgggggggcgaaaagtgaacttaagcccacaaaaggacaaatcggaaaaattatttgtaatacaattatacactcattagttatgaggtttttgtatgaagatttaccaggctcaaccacatgatgtggatactatccttcccctgtatctcgggtaccgtcgtttctacgaggtcgaagaaaatgcctcgcaggccagagattttattctcaagcgccttcagcttaatgagtccgtgatcttttacgccgaggttgatgggaaagcggtaggctttacgcagctctatcctttattttgctctcttgagatgaaacgtatttggttgctttatgaccttttcgttgatgagtcagctcggaagcatggtgtggcacacaaactaatctcacgtgctgagcaactggcgaaggagagcgattcggcatttattatgcttagtaccgctacagataacatccgtgcacaggcgttgtatgagcgtaatggatttgtgcgagatactgagttcttcgtgtataacaagtttctgaaataaatgttcgatgtagccataataaagtggttagttaatgcctggcgggttagctcactacttgagtatggcgtcaatgcaacttacccagtggtagtcgtctcttctaaactgccagactatacaactggatagccttctactttcaattttgccaaagttgacagagagaaatggtaaggcagcatgagaaaacccgcttcggcgggttttcttttttgcactggtaaataggggcttatacgatacacaaaatatgccgtcgacaaccgcgcaaaacttttcactccgttagccatgaaagttaaacaaaactcccaaactttcaattgtgataatctcttttgaaaatagtggcttgtagggtgatcttcatctgccatcatatccctcgcaccgtgtaattttcacatgtaagtgattcaacattaatttatactgtataaaaacacagtgtatgattttgcttccgggaggtagggatgcgcagtgagagtgacgagtattacgatctggttaaacgttctacaggtgaaattgtgggcagtatcagggacgctggccgagccctggtgtacacggctagcgggattacttctatgcgaccgctacttgaggacgagggaatatttaatctcaacacaatgaccagttttctgcatcgcctcggctaccgagttatcccaccttctgataatatgaaatcaacggcctgaacaaccgttaacctactgcgccacggagagaaaccatggcgcaattgcacttaataaagcagtcacaaggtttactgatccctgccacgcaggagaccagcgaatttctacaatcaaaatgcaagctcggcgccgttctggaggccgactttaaacttgtccgtaatccggcgtttcatcgccgttactttgctttactcaatctcggttttgaatattgggaacctaccggcggggcgatttcgtctaatgagcgcaggcttatcacaggttacgccaaattccttgctgcatatggcgggagtgaatcggcgttacttgatgccgccgggcaatatctcgaccgaatagccgagaagcgatccggctatatcagtatttgcaaatctttcgatgcttaccgggcgtgggtcatcgttgaagccggccactatgacgccatacagctgccggacggcacgctgaaaaaacaccctcgcagcatttctttcgcaagcatggacgaatgcgagttccaggaactgtacaaagcatcgctcgatgttctctggcggtggatcctctctcgttcgttcaacagcctgcaggaagctgagaacgccgcaaaccagcttttaagcttttcggggtgatgccgatgaaacgctcatggtttcaccatcacgaatgcacaacgcagcaggccgacgaactgattgcgagatatcgccagcggggcgtaaaggtcgaacgaagcttaaaccctgactttatgacatggaccgtcagcgcgcagctggtggaggacaaaaatccgccgcggccagactctcgctggcgcaacaggatgtgggagtgagtatggcgaatcttcgcaaagcggcccgaggccgcgaatgcacagtgcggatccctggttactgcaacggcaacccggaaaccagcgtactggctcattaccgcctggcgggtacctgcggaactggatacaagccggacgatacacagggcgctatatcctgcagtgcttgccacgatctcatcgacggcagaaagaaaaccaccgacttcacccatgaggaattgcgcctgatgcatgcagaaggcgtgtttcggacactcgaaatctggcggagagagggactcattaaatcatgacgactgaaaccgaaagcgaactgagcaatattgtcgcgtttcccacaaaagaggatgagccgcgtgatatgaccaactttctgtatgagcaatccgagcggcctttttgccgtcatcctgccgtcagcgtcaacgagaaagaacggcaggttcgttgccgcacatgtggtgccgcagtggatcctttcgactggatgctgtcacttgccaaaaaggagacgcaacttgcagacaacgtgaaagccttgcgcaaagaggaaaaagagcgccgtaagaacatcgagaaacttatccagatcgagcgtaacgccaaagccagaatccggagggcgaaaaagtgagcccagaaattatcgaggctattcgccagcgttggcgacgtctgagtcttgtccgttatcggggttcgttcccggtggcttatcgaatcctcagaaaccaaatccgcatctataaagcaggggcataattgtgaaacttgaagcgttaccaaaatttttctcaccaaaatcgatgatgcccggtgctgtaccatgcgggatcaccgctgatacgttaacgattaccgacgtcatggctgccctggggctggcaacatcaaaatcggcgataggtatcgaactctaccttgcaaaagcgggcgttctggcgccggataatataatcgcctttatcaatgagcttgctactcagcgcgccaacctgagtaagcctcttcaggctatggaggaagagctgcgggttgagttcttgcgcatacttgctggatacgttttccgggactattcgctgagcgcagccagcaaggttacatgcagtagttgcgacggatccgggttcattgacgctgaggtattcaccaacaaagtgacttatccggatggaaagcccccgaagtgggccaaggtcacaaaggggatctcgccgtccgactgggaagaggtgaaaactgtgcgtgagcaggtaagggtaatctgcaaagcgtgcaacgggaagggtagcacaaagaacgaatgccgctgccgtggccgtggcgaggttcttgataagaaaaaatctgagctgcaggggcttcctgtttttaagcaatgtcctcgttgcagtggacgtggttacccgagattaaaagatacggaggtattcaaggcgctgggagttacagaaaccacctggcgcagaaacttcaaattattcttcgataggctggtggagttctgccatgttgaagaatccttcgcagaaaagatgctcgaaagagttacgagatgattttataactggctattgcaaacgtggcggaaattggctaatctcgttccaacgatggggtatttcgcccacgttaaagatattaagacctcgcctcggcggggtttttttgtcttcgtaagggctttatgtctcactcatcatcaagaaaaaaggtgctgcactcgactttaccacttacctcccgcgcttcgcatgcacgaagttgtgtcaaccatgtagccaatcgagttggcatgacgagagaagcgttgctgaataaaatcgtgagtgacacaggggttaacttagaggggcccctttcggaagaagagttactaaaagcgtatcattactttgaatctctctaagataaacagctaacggtatcatttttatttacgatagagacttcctttaccagtccttgctctctcccaaagttcctcatccgtcagggttgtttgaatcagttcgattggaacacctgcgtcattgataactgctacgaagtaatcatctatgggctcataggggccgaggattatatcttcatctctgatggctgctgataagttatcaactttaaacgcaacatgaggtaccgtttttagtaaaggatgaagtggtgagtcgtcagtaaagcgatgccactggactttaaatttcccgggattgtcggaagtgagcattccagccttctcactgaacgttccttcgcatcttccatcctgtaatggaatgccaaaatggtgaaactcgtactgtaagtttcttttcatgagcaaactcctcaattaaaaaagcgttcattattatattgatcgtttgctcaatgcggaggcaacagcaatgcacatatgcttcatctgaggtgaaagactatcataatgtccgctaatccgagtacagacatgattactcgagtagttgcttagctggtggcaagaagatacatcgactgcatacactgagcataaccggattttgtattaaatgctttgggaagtaagtctgttattgacgcatggaatgataagaccataaattatcaacgtggtgaatccccctgtgcggaggggcgaccagtcagttacagaaacctgtaaatgcagcgcgggccatgccgactggggcatgctcaccgggaggcacccggcaccacactgccactaaacatatttaagatttatggaaggtttatttctgcggttgcccgtctatgtttatagaacgtaacggcaaaagtgaatgcttcctggtaaatcggtagctcggactattaggagtggcttcgtttcgttactacctagaatgcctaatttctgcccgttcctctgagcgggctttttttcgccatgaataagtctcctcggaaagctgaggtacaaatcatttgaggctgcgcttatgcgtggccttttctttttcccctcaattctgagaggactcacagcaataagagggggcttaatgtccgatcctttaactggtaccggcctgatttttggcggcggtttaattggttccgtcgtatatggcgttatcacccacaccgattttggtgtggtatttggggcttttggcggcgcggtgttttatgtggcaacgaccgcaaacctgacacgtggaaggcaaatagcttacttcatgacgtcgtttattgtcggtgttctggctgccggattattaggctcaaaatttactacctggacaggctatacagatcgtccgcttgatgcgctcggtgcggtggtggcatctgctgtcaccatcaaggtcctgactttcattaacagccaggacttgagcagcctgttcggattactttcccgattaaggggaggaggttcgaatggtaataaatgacccggcagcgctggccaatgcggtgatatgtgccgttattgtctgcgctttgatgttttatcaacgtcgcggtgccaggcatcgccctggtatctccatcattgcttacttgcttgtactgatttacgcgagcatacctttccaatttatcttcggtctttacgtacagtcccactggctggtggtattggcaaacgtgatgatatgcgccgccgtgctatgggctcggggtaacgtggcgcgtctggtcgatacactgaggcactaatgaatcaaacacaattccagaaggcggctggcatcagcgccgggttagctgcgcgctggtttccgcatattacagccgcgatgaaagagtttggcatcacttccgctatcgaccaggcaatgttcattgcccaggtagggcatgaaagcacgggatttacccagcttgttgagagcttcaattatagcgtggctggcttgaatagttttgtccgcgccgggcggctgacgcagggtcaggctaattcgctcggccgccggcagggtgaaccatcgttgccactggaaaggcaacgagcgatcgccaatctggtgtacagcaaacgcatggggaataacggggcaacagacggctggttttaccgcgggcgcgggctcatccagaccaccggcctgaacaattaccgcgaatgcgggaatgctttgaagattgatctggttaaacagcctgaattgctggcacaggatgagtatgcggcgcgcagtgctgcctggttctatacctcacgcggctgtttgcgttatcccggtgaccttacacgcgtcactcagattatcaacggcggacagaacggcattgatgaccgtaaagcccgctatctcctggcaaaaagtattcttgtttgagggaaatatgaactatctcattaatcgactgaaagagccgtcaacctggcgcggcatcatcctggtcattgccggtgtcttcggctatcagatgcctccgggcattcaggaaaccgtcatcgctggcggcgtagcgctggctggcgttgttggtgcggtgatgccggacagcgttaagaagtaacctggccagaaaccagcaggcctacagaaagccgctttccttcagttttttagccaataagtaattggtgattactccaagagaaaccccaacaatccacggcacagctgaattaagcattagcgagttgttcacattaatgctggcggtgatgcatgcataggtatttgtaaaagcaaaccatgtaaaaagtatctgtttcatttggttatctccatgcttttcctgacaacaatatcaacctgcgagccagtaaaagcaaattggcgcacaacaaatcattggcaggccaactgccaaaccttacccccactaagggataaaactaacattatccccatgcaaggataaaactatgaagcaaaaagcgtatagaccgcagctgaaaggcaatgtagcagtagtgatgctgccccgagtcgcgtaatggctagcctgtgtagtgatggggaagggttcatagataacaataagctccggtaaagcagcgcgaaagccaaatataccaagggattagccgatgcgaaattcaacctgaagatctgcagcgttgtattagctctggcaagcgcgggctgcgtgtcaaagcaaaatgtcccgcaaacggagcgaccggctccagcggcctgggcgatgcttccggccaccgacttgttgactccgctgaacgggattatttcaccctcagagagcgaatcgtcaaagtgacgaagcaggtcggatatctgcggtctacatcaaagagctgtgcctaaaataagcaaaagtgaaaaatagttcagttgttcatgtctatttatagctattcaattctacgaatatctattcattgcgtgactatatctatctgaatttaaatgatttaatcaagccttgcttactgcagggcttttttgtttcggacttcaccgcgcatctcacgcgcacctctacgagagcctttcagtaagcgagcctgagaaattccgttataggtggcgacctctctcgggcggcttttctgtgagacaggctcactttctaaaaggtaaaacgctatgaataatccgtcagttattccggccttcgattttcgtgaaatggtcacaaccatcgataacaaggtcatcaccacttcactaaaagtggctgactattttggtaaacgtcacaaagacgttctgcgagctaatcgaaaccttaaatgctcagatgatttcacccggcgcaattttgcgcccattgatttcattgataaaaatggagatgttcagccgatgtataacatcacccgagatggatgcatgatgctcgtgatgggtttcactggcaaaacagctgccgcagtaaaggagtgctacatcaatgcttttaactggatggcagagcaactgagccgaagatctgccataggtgaagagatgcagcaccgctacgccattaaagaaacgcgctcaaaactgaaaggtacgatcgggagccgtttgatgaacgagcggaagaaagagaagcgcatcctagcggtcgagcatgagcacatcatgcaggtgacgcagccagaattgctgattggctaagcggaattacagagccacttcaagaggtggctcaataatgcatgccgagaatggagaaccgaactcaatctctcatgtaatcagatttttttgctgctcggtagttttcctcttcttcacaactctcgcagagcatgctctgttcttgatagcaatgggttagtcgtccttcttcaatcatatttgggcagtcaaaattggagccattatcaccatcgaactcatcgaaccaaccttgacatgggacattttcgatcaagggaaggatagccttttcaaacaggaagcgctgttttactgagaggttttcggtgcttttctctccgacaacttgattagctacgccaataacattttctgcatttagacgattatcctctgcagactcgataatgatttcttctgcgtttttaatcagatacttaagagtatttaagttcatctcgactcctctttgttgtgttaaaagcttcaaattttttcatcgggcatacgttaccatttaataactggaataaacatgttgttaatcactaaggtggcctgagtctattggcactttaaaatgaaggggcgacttctccttggttttacgcgcgacaaaattattagtaaccggcggtttcagcctgctaacttcagaacccagagtgcaatgagaagctttctctggtgtgtcatcagtaagttatctgcatcaggttggctcaattgtccggataagcgctgaccttgctgcagacacaccgatccccgaaatggagattccgttcacatggcaggctagtctggatttaaacgcgaagctttactctgcgctgggacagtgcaatctggataaggcggggattagaagtatagaggatagccggtcagataatagtgagctaggctcaatgtgaatcgctgaaaaaactcagaaaacaatagtttaatcagaaagagtttgatgagtggtttgtgcatgtagcctcctttgagaaagagaagaggacgattcctcttctatactcgccactaatacctgtcgcgatgagtctttgcccgaaacagccttctttcccctcttatcctcgccactaattatgacaggctgtctaacttgttggacaacgttgagcaatccagaggaatgttctgcatggctgaaactgaagatcgccgaccattccctcccgtcaacttcactagcgaaaactggctgccgtatacccggctgatccctgctaccgaaatcggcgaatgggtaaatcagaacatcctctccgaagagggccgaatccataaccctgcagcattcgaacagtttaagctggaaaatagtatttcattgatagtatgcctgcctgttagcagggctgcatccgcacgcagtgtcttcgacaagcaaatcgagttccctgttgtactattaagtgtcggtagctcatttttttgctctataagctttctcttttaagtgctccagtataggtttgacactatcaatccagtcgttttttgatgtgtcgacagtgtgaataaaaacattggcagcccctcgttctaataagcctctggcttgtacatctttgtggagtaagacaagggttggcttttttaatgatagagcgatggctgtctctatctgattccattcagtaggtaaaacaacgttattaactttattttctttaatggagccagcagttatgtatatctggggtaaggcgaatataattacacattcacatcgagtcattagctcaacaatatcatcaaagggtgtttgtaagcatggttgactaatcccaattgtattgccgtacatcattaaatctgggagtgtgtcgtcaaatttgcctaaagcatcttttaattcttcaggtagccaattaggccgtgatatgaaaacctccatcaacccgctctctttgctcataaatcaatctcctgcataaaagtactttttcgttgagaacaaaaaaacctctcaacattatcgttcttaaatcgaatgaaaactagaggtactaatggcaaaaccggactggggcgagcttcagcaacggttcctgtccgatcatgccgcaaccggcgtatcaccgaaggattggtgtaaagcgcagggactgaactacgctaccgcccgtcgatatatcaagaagccttctgcgcaaactgcgcaaaaaagtgcgcaaaaaaaagtgcgcactgcgcaaaaggaaaaatgcgcacaagagctggtggacgatgatggtcttactgctcaacaacgcttatttgtcgcggaatacctgaaggacaacaacgccgcacaggccgccatccgtgccggatatagcaagaagactgctgaacaaattggttatcagctgcttcagaaaacttcagttgcgcaggccattgcgcagcagcagaaagcatccattgtgcgcacgcttggcagtgccgatgccgtgcttgagcagatgtggcgcctggcaacgttcgacgccaaccagctttcacagtatcgccgcgggagctgccgttactgctggggcttcggtcaccagtatcaatggcgcgatgctgttgagtacgaagagaagcgactcgaagcgtttgagcgaaaacgtcgcgagccattggatgatggaggctacggatacgaccacaccagcgcaccaaacccggaatgcccccgctgcaacggcgatggcatcggccagcctttcttcgctgatacacgcaagctggcgcctgatgctgcgcttgcctattccggtgtgaagcttggtaagaatggcattgagataaccgccatcagccgtgagcgcatgttcgaggcggtgatggagcgtcttggcctggctgatagtgaattcgcccagcgtctgcagcagattgaaattgagcgccggcagctggagatcgaaaaattacgcaaagagctggctgctgatccggaggatgacgaaccaacgccagttgcaatcaatatcaacgtagtcgatgcacgagtgagggaagaggatggcgatagcaccgacgcttaacatccctcaggccaaattccttgcgatgcagtacaaatttaaggcctatgtcgccggcttcggttccggtaagacgtgggtcggttgtggtggtatctgcaaagggatgtgggaacaccccaaaatcaaccagggttactttgcgccaacgtatccgcagatccgtgacatcttttatcccactgttgaggaggtggcccacgactgggggctgaatgtcaaaatcaacgagggaaacaaagaggttcacttctacgccgggcgccagtaccgaggaacgacgatttgccgctcgatggagaaaccgcaaaccattgttggttttaaaatcggtaatgcgctgattgatgagctggacgtaatgcccgccaaaaaggcgcagttagcctggcgaaaaatcattgctcgtatgcgttacaacgtggccggtcttcgtaacgggatcgacgtcaccacgacgccggaagggtttaaattcgtttatcagcagttcgcaaaggctgtacgcgataagccttcgctctcaacgctgtacggcctggtgcaggcctcgacgttcgacaatgaaaagaatctgccgccggactatatcccgtcgctgatggagtcatacccgccggagctgatcaaggcttatctccgtggccagttcaccaaccttaccagcgggacgatttaccatcagtttgaccgtaagctgaataactgccgggaagaagagcaacccggtgagccgctgtatatcggtatggatttcaacgtcgggaagatggccggggttgttcatgtgttacgtctggggcttccgtttgcagttactgaaatcatcaaggcttacgacacgccggacatgattcgcatcatcaaagagcggttctggctatgtgacggccatgactaccgaaaggtgcgtgaaatctatatctacccggacgcttccggcgattcccgcaaatccagcaatgccagcgccacggatatcgctcagcttaagcaggccggcttcaatgtggttgttaatgcatcaaacccgccagtgaaagaccgcatcaacgcgatgaatgccatgttctgcaatggtaacggtgaacgtcgctacaaagtgaatgtaaagcgatgcccggtgtacaccgaatcgcttgagcaacaggtttggggcgaaaacggtgagccggataaaacggcggataacgatcaccccaacgatgccggtgggtatttcattgtgaagcaattcccgattatcaaaccgactggaaaagtcacccaactgcggatgtaaaaccatgcctgatatttcaacgcccaacctcgactataacgacatggttgaggcatgggatattaatgatgcgctgatgggcggcacgctggaaatgcgccggcagggcaagaagtatctcccgaaatggccgaacgaagatcctgaaagttataaggagcgtttggcttcggcaacgttactccctgcctatgaagaggccattaaacaaaacatcgggcgagtgtttgctgagccgacggtactgagtgaggattctcctgaacaaatacgggagctgtcgccagatattgatatggaaggaaaccggctcgatgtctgggcacagcaatttttcaatatcggattccagtatggtctggtacatgcgctggtggatttccctaaaattgaccgggaggcagtaaaaactaaagccgacgaaaaagccgcgggatcccgcccgtatgccacgatgcttaatcctcgccaggtcatcggctggaaatcgaaagtggttaaagggaaagtggtgctgactgatctgcgtatcagagaggtcatcattgttgatggcgatgattatgggcaaacgaaagttgagcaaatacgccatatcatgccgggcaaggttgaaatttatcgccgaaataaaggtgataacggcgaaagccagtggcagattcacgacgagtgggaaaccagtcgcgatgatattcccctggtgacgctttatacgaaacgcacaggctttatgcgcggttcaccgccactgcttaatctcgccttactgaatatcaagcactggcagagtcagagtgaacaggacaacatcctgcatgtcgctcgcgtgccgttgctggtggcttacggtctggctgatggcgaaacgttgacgataggttcttcctctgcgactcgtttcgatgaccgccagcggcagggactggaatatgtcgagcataccggggctgcgattgaagccggtaagatttcccttgaagatctggaaaaccagatgcgtcaggccggcgcaaaactgctgcgcgcggaaaacacatcgactaaatccttagaccagactcacgaagagcggatgcaggagaattcacctctctacaccatggcaagctcgcttgaggatgcgctcgataatatcctgcagattatggcggaatggctgggcgagaaagagggtggcaatgtcgatgtacgcaccgaactggatgtttcagcccagacgtttgatgccgcagctgcaacagctgttcagtcgctccgtcaggggggggatatacgtcaggtcgatgctgttcgcgttttgcaggccctcaaatttatcgatccggatgcgaagcccgaagaggtaatcgacgagctgcgaaatcagcaggtcacgctggccggcggactgagtaacccgggtggtgcaaatggcaacggcgaatgacaagcttcaggatgaatcgatagcgcatgcgatatggatagcgcggtacagcaccagcgttgcaaacaggatgataaaaatcctgaatgacagcgatgcggaactgacagccagattgctggtagcgatggatagcctggatgctgacagctttaccgtgtcgcgactggaagcgctgctcgttagtgtcagagctctcaatcgcgaggctgtgcagtcaatgtacgcgggactatctgatgagctgctgcaactcgctcagcacgaaacaggctttcagctgagcctgttccagtttgcgatccccgatgatgtgctatcgcttcacccgctggtgggcatttcaccggatgccgtttacgcaactgcgatggcacagccatttcaggggcgcctgctttcggagtgggcagataaccttgaagctgacaggatggcaagaatttccaatacagtgcggcagggttttctcctgggcgatacgcatgagcaaatcgccagaaaggtccggggtcatgctaaccgtggctatcaggatggcgcgctgcagatgagccgcaccaatgctggcagtattgcaaaaacggctgtggggcatcttgcttctacggccaggaaaagctttgcagatgcgaacgatgacattttgaagggtaagcagtggttatccactttggataaccgtacatcaaaagactgtcggattcgcgaccgcctcaagtacacactggataacaagccgatcggccataaggtgccgtatctgcagggacccgggaaaatccatttctgctgtcgcagcgtcgaaacctacatcctgaaatcgtctgatgagctgggtattgctgttgggcaaatatcagatagctcacgtgccagcatggacggacaggtgccttcggataccgattatcagggctggttctcgcgccagtcgttcacgcgacagtcccagatcgttggcgtaacccgggcccggctgattcgtgacggcggcatgtcgcccgatgatttctacaacgacaagggcgaatggctgactctggagcaacttcgtaacctggatgctcaagcgttcagcaacgccagactttaaagctttttaagtcttcaatcaggcttcctccgggcggccttttttattgccgtgatccggatggtgagcggtgcaacggtcggatgaccaccgaaaaggtaaccacatgaaactgaaaacagtcgaagttaacggcaaaagctatgcagaagtcgattccagcggtttacccgtctacgtccacgatgacggccaggaagttggttttgatgctgtgcaggccgttgggaaaatctcctctctgaatggcgaggcgaaatctcatcgtgaagccaaagaagccgctgaagccagtctggctaagtttgccaaaatcggtgatccggctaaggcgctcgaagcgctggagatgatgactaaaatcgaccagaaaaaactgatcgacgcaggcgcggttgatcaggttaaagcggatatcaccaaatccttccaagcgcagcttgatgaagctactcagcgtgcgacgactcttgaaggccagctttatcaggaaatgatcggcggccgtttctctggctcgaaattcatcgcagataaagtggcaatcccggcagatatgcttcaggcgcggttcggtcagtccttcaaagtcgaggacgggaaagtcgttgcctatgatggctctggcaacaaaatttattcccgctcgaagccgggcgaactggcggcctttgatgaggcgctggagttcctggtggagcagtacccacagaaagaccacattctgaaggccagcggcaaccagggaggcggctctcgccagtctcagcattcactcgggcagaaaacgatgaaacgcgatgcgtttaccagtttgagcccgacagatcagcaatcaactctcaaagacggtatcaccatcgtcgattaattctttgccagtcgccggatggcagctggtgccggagctggatagctcaaccaaccctatattttaatctccaaggaatccatacacatggctaatacgcttaccgggttgatcccgactatcttcacagctctggataccgtatctcgcgaacaggtcggatttatcccggctgtatcgcgcaatgcgaaagctgatgcggcggcgaaggaccagactgttactgcgccggttgctccaccggcaaccactgttgatattaccccgggggctactgcgccaaatgacggcgaccagacgatcggcaccgttgatgtcaaaatcaccaaatccaaaatggccccggtcaaatggaacggtgaggaacaactggcactggggcccgcagggacatacaacaccatccttgctgatcagtttaagcaggcttttcgcgcgctggctaatgagatggatgcagatctcgcggctctgtatttcgcatcctcccgtgctgttggtacggccggcaccgctcctttcggtattgcaggtgatttgtcggatgcggccaatgcgcgccaggttctctctgacaatggttcgccaacaactgatctgcagatggttctcggttcttcggctatcgcaaacctccgcggtaaacagtctgttctgttcaaagtaaacgaatccggtactgatgcgcttctgcgcgaaggtatcgtggggcgactggaaggtttcaatatccacgaatccgcacatgttaagaaacgcgctgcatctccggctgccggatacctggtgaatggagcaaaagctgaaggcgatattctgattgccattgataccggcacaggtgcttttgcagcaggtgaatcgtgacgtttgacggggacagcaataaataccttgttgctgctgcgacggccacagcaatcaccctagctgctcctggcttacgtcaggcactggccgacaacaccgctattaccgctggtggcgcctataccgcaaacatggcgtttgatcgcaatgcattcctgcttgcatcccgaaccccggcaatgccgcagggcggcgataccgcggatgatgtgatgaacgttactgacccggtatctggcatcacttatcaggtagcactgtaccgccagtatcgccaggtgcgttacgaagtcggtttgtcctggggcgtagcggcagttaagtcggcgcactcagcgttgttgctgggctgataaacaggggcttcggccccttttttttagtggagggctaatggccggattaacaaaagagcagcgcgcccaacgagctgctgagcaaactgcgtctacgcaggcggataacaacgtacccgtatcgaccatatcgcagctggtgacgatgattaccgatttcccggcattccccggcgcccccaataccgccaacgttcaccctgatgaagtggagaactggaaggcgcacggctggaaagaaatggagtgatgcatgatcactttcatcaccgttgaagacgtcaattcgattctcggtgccacctggacagatgaaagcaaaaaagccaaatctgtgctgatggctaatacctggatgaatggacttaacctgaaaatgccgtgcaataaggcaactcacgaaatcatcattactgacgatatgaaacaagctggcgcctatgcggcgctagcggcctcgaatggtggcctttatcagcagaaaaccgattctggtgtgttgctgagtaagacggtagatgccgatgatgtcagcgtttcaaagaccttcgcggaacttgctaccaacagctcggcattgcttgattccgatctgcagctggcgcttgcaatgctaaagccctatggcgttagtcagtctcaggtacggctggtaagggggtgatatgcaaaacactgatgtgcattatgccggtgacgggctcggccctcgcgatgtgtttgtgaatggaaacccgatcaattatgtcgtttacgcaaacccggcaaagggcgttgttgagtttgctccgcttccgctgagggttaaacgcaacggcgaaatctataccaggaaactgcgtggtaacgtcctggtcctttttactggcggatatgtttctaacaatatcccgcttcagcgttttggtgaaaaaggcatagaggaggtagaccgtgggtatccgcgacgaactccaaactgaagtcgccgcagccttcgatacagacctgcaggatgccgttaaggatttcactgggtcatacaccgttcgaggtgcctgggacccggtgacggaaaccggcactgaaacgcaggtgacttactcggggcgtggagtgctggcgcgttataaactgcgccgtatcgatggagttaacattctgcatggtgacgtgaagctaaccgccctggtcaatgaggtgactgacaagccggcagtcgggcatatcatcaccgcaccggattctattacgggtgagcttcagcgttacgagatcatcaccgcttctgccgactctgctggcgctgcgtactccattcaactgcggagggtgtgatatggctaagggctggaacattgacccggcggcattcgccgggctggtggcagaagatgtcaaactacgccagcggacaatcgccattcaactgctgaatgaaatcgttcaacgttcgccggtaggaaaccctgagttgtgggccatcaacgcgaccgcggttcaatacaacaaagctgttggggaatggaacgaatctctttatgccgaccctgctaacctgaccaaaaccggaaggctcaggaagaaagtccgtgttaatgacagcatggatatcaggcggccggctgagtatcgcgcaggaaccttcagggcatcgcattttgtcagcatcggcgaacccgatcactccgtcccgaccgagccggatccgcgtgggacaatgacatttcttaatggcaaaaatatcattgaccaggcgccagcctactcggtgatttacattcagtcgaacctgccttactccgtgcctctggagaatggtcactcaacgcaggcgccaacaggcgtctatgccgtctcgtttaatggtgtgattcaggcctacaaatgaccctttcagaaatcagaaacgctgtcatttcccgaatggcggcacagaccgctattgcctctgatgcggtggattatcccaatggtccggtatttgaccccagcaaccgcgatatctgggcccgcctcaccaacattgcaggacaggctggcgcaaccgagatcggggatgggccagtcgtccacaggacgggcttactcatcattcagctatttgttccggttggctccgggacgttgcttatctcccggacggctgatcagctaacggagctattcgagttcaaggacgacggaaaacttagttatttcgctgtttctgctgtgccggcgggtgagaccgatggctggttacagctcaatcttcaaattccttatcgcgctctgtagcgcacaaaaaacaggaggctcctgtgagctcaggtgcaaaagtagtagccgcgtttattcgcgagacaacgccaggaatcacgccaacagcaggggcgtggaacctgctgcgccgttcttcatttggtctgaaaccaactcagaacaccaacgacaatgacgaaatcgctggtgaccgtatggcgcagggtgtttcacgcggcacagtggatgtcggcggcgatgtcggcacacggtttcgctggaatcagcatgacgattttcttgccagctgtttcggcgccgaatgggtaaataacgtgctgacgatgggtaatggtcgtattacgttctccgtggcgacctttgccagtgatgtggggatcgcccagattgcacgcggttgccaggttggtaccttccagatggaaatcccggccgatggtgatatcactgcaaccattacgtttgcagggctggactgggagacgaagggggacgataccagctttttcaccacgccagtggatttagcgggggcgctgcgttactccttcaaagaggtcacaaacatccggctaaatggtgttgatggcgggacaggcttctgcgtcgacacctttaacattcagttcaacaacaatatgcagactcagcgctgcatcggtaccggttcggcgttcgccggcgcaaacattccgacaacctttaccccgtcaggtcaaatcacgctgtcatggtcaaaggctgcctgggaggtttacaaaaaaacgttcaccggcgaaacggtgccgtttagcttcacgctggagaatgatgaaggggcctataccttcgatttcccggaagtgcagatctccggcgactggccggatgcggggagcactgacattgttcaggttcaactggatatcaccgcggccaatactccgccaactattacccgcgttcctgccactaatggcggtggtgattaaaattggccctctttggagggtttttttatggagttttttatgctgattgttaccccgaaaattgatttaaatggcgagcgctggttttatccctacaaaaagccagaaggcagcaaaaaggaattctcgccggaagaagaatcgctgttcaaacttcgcctgctggtggccagcagcgagaatccgcaatatcgctctcgtaacgcgctggtgcgtcgccacatcgataagatggacgcaggttataaggtggggacaacggattttaatctcgccagcgtggacgatatcgactctgttgatgacctgctgatcgataacgccgctcggttcctgctgaaaggctgggagggagtaggtcagttagtcgacggcatagaggttgctctcgactacaccccagaacttggggccgccatgctgaaacagcacccggcgctatactggctgatactggctgaggcggcaaacattgctcagggtaaggagcagcagactcaggaaaccgtaaaaaagctatagacgcccaaaagtggctaaaggaattcgccggcgaacagggcgagaaagcaaagtggcgcagggagaagctaaatctcccgcccattccagagcctgaaatcgatgcagtcactggagagatcctcaacgcttacgccatgatatcgcgcggcagaaagtatgccggcatggccggagtgccgctccctctatccctgaacgatattgagctttacctggcatcgcgcaccatcctgatcgaccgcattgagtttgatgcagcaatactagcccttgatgatgtctggagggctgagtgggcggaagagcaaaaaaggcgggcgatagtgaaatagccttatcattgtttagctgtctctatatgttaggatgtttctgattgtaatcacaggaaacataaaatgaagaaattattgatagtggcactgggggcagtgcttttaactgggtgtacaacgccggctcgtaactatgtgcctcaaacaaagcaaatcagtattccgccgctaaatacagtaacaacaacctacgttggcgaggatatggttaggcagggaattgatgctagcattgatgccattcatttcaatcaggctgtggttataggctcaatcggtgtctatacgatcccggcaggagactacgtaaaaattggagaggattcaaaatcagagttttactctaatgtagaaagaacatcaggtgcagttgttcctaaccgcttcatggttaatgatcccacacaaagcatacagctcatgaagaacggcgaaatttgtattgtcacgatttatggtggaaccaagtgtgatacaggcaagccatttacgaaagtaaaattccagaccgagcaacaatcttccttccagcaaactcttatctacaatgggaaggtcggcaacaaaattaatattggttatagagaatttcaaggaggtatggctcgggccgctttttctaatgaggtagagtacgacctttctgagtccaaaacgatacgttataaaggggctgtgctggatatcatggatgcaaataatcagtcaataacctttaaattgactaggaattttaatacaaattaataactccggcccataatttgggctgttttttcatgaggtgggagtgtgaggattcttggttatctagccatcttaataggtgtgatcttcgctgtttttgcgctatttatggatgtaacagtatcaacagatgatggctacagagttaacaaccttggtttaatgtcttcacgacaaaattacatgatatttggcggattcgtagcgattgcaggaatcatcatcgttttggtcggtgagaagttcaaaccatccgcaaactcagtcaaatgtccatactgcgcagaattaataagcgctgaagcggtgaagtgcaaacattgcgggagcgacgtcaccccttcgaagacaatagttagcgctgacgatgctgaggccagtgataggttggctgacgtcaatgtaaagttgatcgcaggggttgtgctggcggtctttgcggcgattatcggcgcaataatttttcaccgtcaatgaattaaaagcgtaacagtttcaaaagctctaacctcgcttcggcggggttttttattgcccggagaaaggtaaatgactgaacaaacatcccgccttgcgatcgttcttgatagctccggggcagagaagcaggctgacagccttaccgttgcgcttgataagatgactcagtctggtgataaggctgtaaccagcatattcaaagtgacaaaagcgactgacgaggaaaaagatgctctcaataaattgcgagcagctattgatccggttggtgcagcaattgatacagtcggtcgccgctatagtgagctaaaaaaatacttcgataagggtctaattgacgaggaagagtttcgttcgctgtctaagatgctgaatgacaccactgaggaactaagtggtgttgcacaagctcaacgagaagcagagaaggccagcaaactggctgctgtgcagcaggaggcgcaggctgatgcattccagagaatgctcgataaaatcgaccctctggcagctgctcttcgcaatcttgaacaacaacaaagtgaactgaatactgcctttaaatcgggcgcaattaatacttcccaatatgatgcatacagcaaaaaacttcaggagactcgtcgggaagtcactggcgaagcacaagccgagcgcgaggctgtaaaagcacatgatgagcaggtaaatgcactgcgtcgtcttgaggcccaaatagatcccgtaggtgaagcattccgtcgccttaacgagcagcagcgccagctggatacagctaaaacatccgggatgctgtcgcccctggcttacgatcgcctcaacagtaaacttgcagaatcccgcgatgctctggagaaaacccaggcgcaattgggtaaaacaagccaatctgcagctcagactgccaacgctatgcgcatgatccctgctcagatgaccgatatcgttgtcggtctttctaccgggcagtcaccgtttatggttcttatgcagcagggcggtcagctcaaagatatgtttggcggcattgggccagcgattaagggcgttggcacatatgtcatgggtcttgttaatccctatagcgtagcagctgcttcagttgggttgctaacttatgccgtctatcagaaccgacaggaaattgatgctgcgacaaaaatagccacaacgtctcttggcgctaacggagatgctgcagaacggctggcgcttaatatggttgccatatctgacaagactggtcaggcgattgatgaagtcagtagtatgtttataacgactaatgacggtgcgagcgaagcaataaataagcttatcgacgttggttttagttatgacgaggcaaggacaaaggtagcccaatacaaggactctgctaatttcaccgccttgaatgctgatattgataagcatcgacgggagatcctgaaaataggtgattcgtggacagctgcagctattgaggtcaaaaattattacacagcagcggataagggtaggcaaaacgtagcgcttggtggcgcaattgaccctacgatgaggtttatcggccaggcattagatctgcaaaccacgatgaacacacttagcattgaaggtaataaggcggtaaaaaattccgttgactggattaataaggagtatctggcggcagacagggttgccggtgcagaagctcggttaaaggaggcaagagcacagtccagaaaaattgctttctcaggaaataaagaagcaatcgaacaggccaatgcgctaattgctgtaagagaaaaggaacttgagcaggccaaaaaagctgggcagcctaagacccacaaagaaaaagcctatacagaggacgcagcaacccggctgattgatcagataaaacagcagactgctgccatgcagtcccagctggatgccagtgacaagcttaatagcgcgacacaggctcggatcaagttcgagcagcagattgctgacctcaaatctaaaacgcagctcaccgctgaccagaagtcgatcctttcccgttcagatgaaatcctccaggcgtataagcagcaggaggcactgcaaaattccgtaaaaaccctggacgattatcggaagatgcaggaacaggtaaagacgaaggatgagcggaccaacgatctgcttaaaacccgtcttgaactgctggagaaggccaaagcaaccgggcaactaaaacccggtgaatatgaaaaaacgcgggcagatatttatcaaaacaccgatatgcaactgccctcgacggttcgtaatgttgtaggaaaccttacacccacaggagggcgactctcaggaacttttgaggggatgcaggggcaaatcaacgaatatggacaggctcagcaagagctccagcgctggctggcagctcaggaggaagcttatgcgaaggccggtgaaataactgccgagggtgaggccagaatgacctctattcgtcagcgtgcagcggatgcaaatcaggtcatagaggctcacaaaaacaccatcatatctgcggccacgcagtccttgtttgatagcaccgctgaaatcatgcgaacggggtttggtgagcaatcggcaatctacaaggtcgcttttgctgcgagcaaggcattcgctatcgcggactcaatggtgaaaatccagcaggctatagcaagcggtgcagttagcgcgccttatccggccaacatcatcgctatggcctcaatcgctgcgcagaccgccagtatcgtctcaaatatccaggctgtttcaggagttggcttcgcctccggcggttacacaggccccggtggtaagtttcagccagcgggtattgttcacaaaggtgagtacgtcttcgaccaggcttcaacgaaccggatcggcgtgtctcagcttgaggcacttcgaaatggccaaccgcttgatgcaactctggggcgcacagggtttggtactggtgttcagaacgttaacagcgataaccgtaggcaaacaactgtacacgcgccgattaatcaggagtttcatctccagggtattactccggagcagttgagcgctacactcaatcagaataatcgacagctttccaggcagttaaaaggtgaactcacaaaggaggttaccatgccacaaggggcttttggcaacgctctaaaaggaaactatacacgacacggccctaggtaagctaaactgcattagctgagacttgattaggtaggtaagtctaacaatctgagtaggtacaagaaaacacaaggatcttattaatggaagcgttgttaacatttacatttaaagacttcatagcttttatgattcctctttttattggcggactaatcttcaataggagacgtaaacgtaaggaggtccgagtgaagttttcatttctttggcttgttttgattgtcggtggaattcttgaaatatgcgatgacatctacacaacttattcctataggcataatcacttatataataatgatacgcttacaaccgtgtttaactatgattttgcaaaaattgttttttgtggggttttgatctttgtttctattgcgcttcttcttcaggagttgcttttaaacaagcagtcacattgacgtatatttcctgtcggcgcatcgccatttttttattttgatatggggctgtgccgaaacaatgtaagttcacattaaatccaataaaattaatatattgataatgctgttttttttgatttcttttagctcttgaggtgagttgataaatatatcgccttgtgtgtttgtttcgatttaataagatttttatcttcattaatctgaaccaaaaaatcagagatttcttcgattccatcgtgctttattctgaaatgaaaaccctcctgaggttaatggtgaaattttattcgagatactttaccgggagcctgcatgactgatatctactacccacatgactatcttccaatgccactgcaggaaggatacggatttcagcctgtaagcccgttaaaacgaacccagttaaccaccggtcgcgcgaggcaaaggcgagcttttacgtccacgccgacgcaggccagcatcacttggtttatggaaaccgatgcgcagggcttggcgtttgagtcctggttccgtgatgcgttatctgacggggctgcatggttcatgatgaagttgcagacgccggcaggcattaagttttacaaatgccgcttcacagatatttatcagggaccggtgctagtggccccgatttactggaagtacacggcgacgcttgaattatgggaacgcccccttgctcctgccccatggggtaattacccggaatggatagtcggaagttcgttgcttgatattgccctgaataaggagtggccaaagcatggagatacttgagcgtttatacgcgagcagtggttcggaggtaatacatgacacgctggaaattaccgcagggcaggaaacataccggctgactcaggggtacgacgatataattgtgatgcttgaagatggtcagttagcgacgttcgaagcttgcgcgattgatatcgcacttcctgcacgtaataccgatggtacacaggatttgaaatttgccatcagcaatattgacggcgtggtatctggggcgatcgataaagttctggataaacagaaatcagcaaagctcactttcaggcgttatatctccagggatttatcagcgctggccacagcgccctacacgcttgatattaaaaacggctcatggactccggcagcggttcagatcactgccgggtacatgaacattctggatacggcgtggccccgtaatcgttacaacctcgttgatcatcctggtctgcgctacctgtactgaggttcctctatgtttcaacctgacaaatatctttcagtcaaatggctgaaaggaggccgagcttaccctgagcttgactgtttcggcattgtgaatgaaatccgcgcagaccttgggttgcccctctggcctgatttcgcaggggtgacaaaagactgcggcggcctggaccgcgaggcaagaaagctgatgcgctcccttgagcgctgcgaaccctgcgagggggcaggagtggcctgttactccggctctgtcgtgacacacgttggtattgttgttttgttggataaccagctacaggttgcagagtgcaatccggctacgaacgtcacatttctgccacttaaccgatttgttacccggttttaccgcgtggagttctggcgatgactatacgattttatccttcgcgtcttcctggcgaaccgctggagcagcgtgaacatggtgaaatgaccctgcatgactggctgagaaaaaacgttcccagctacacgcctgacagaacgcatccaattgcgattgaagttaacggacggcccgtgcccgctcctgattggtcgttatgttttttacgcccagatagtgatgttcgcatttacccggtgccgtatggttccgggcttgaaattgctgcctgggcagcggtggctgtcgctgtagcatctgctgcatacagcatcatcatgatgtcccagttggggaaaattggtgcatcgaccgccaacggcgatcaacttgacctctctccggcaaaagcaaacaccgcaaaactcggtagcccgattcgggaggtatttggccgttgtagggtgttccctgattacctggtccagcccgtcagccggtttgacccggctgatccgcagatttaccgcactgaaatgtttttatccgtggcatatggtgtctacgctgatttccgcaacacagtgaaaatcggtaacacgccgctttcctcattcggggatgatgccagcataacgatttatcctcctggggcggatgtgagcggtgaccgcagggcggacaactggtttaactcgacagaagtcggtggcaccaactccggtaccgccggtctcgaccttgcctcaacggggccggggagggtgagtatcagcgctgcggcggttgccgtttctggtgatgccgttacgttgattggacagatggcagacgacgattcaggaaacgacacgtccgtccctgagtcgtggaaaccgggtacagtaattaccatcgtggcacctgacaccttcactgtcagcaatgacggaggacgaacggctatccacggtgatttctcggagctgaacccggttgtaggtcagcctgtgagcctgcactggacgaactacgattacgatctgtttgtatcgtcgttcacgcctggctctccggcagttcccggcgtcggcggttctgcggcgtcacttaccgcttcggcagcgccgaccacgtatgatttcagcgcatcccctgtttcgttcactctgacctggtccgggcatagctatgtgatttcactgtcggcgaattatctcacgatggctgcgttgctcgataccatctccgaccagcttaccgggtcgggacttatcgcgcaggatgacggtgggcgcgtacagattattgagaaaaccagcccgtggatcgggcacagcatcggctatacagtgctaccctcggcagtattcggggatgctcctgtaaccgttgcgggtgtggcatcgaccggcgggagcccggaaatattacccactatcacgctggcatgggggagcgcttctggaaccgcgttttcaggtattcccgacggtacccagcgtattgcgttgagtgcgaaaggggaccagtacacgataactgacattgacggcctgacgattaccgtcagcaggatgaaggaggatgtttccggcaatctggtgattgatgccggctggccgggattcacctcccgaacgctgctggacgccagtgttacaggtttaaatgactcatcggactggatggggccatttttgtgctgcccggagggagaggttacgactgaagtcgaactgaactttacatacccgaatggcctggtagatatcgggagtaaagacgggaaaattcactggcacgatgtctggataactattcagtatcgtcttaccgggaccagcacatggcaatctgttttcatcagacacggcaataacacagtcaacatgatcggctacaccgaaaggattgtattcccggtgccgggcaactatgagattcgtgtcaaacgtgatacgccggtatggggcggaacgacgcgggactccgtgcagtggcaatctctgaaagccaaattgcctgcacgaccaacccgttaccagaacatcaccactatggcgattaccttgcgaacggggccccggctggcttcacagtccgatcgccgcgtcagtgcggttatcaacaggctctatgacggcagtccgtcacgcagtatttccggcgggttttactatctcgcccgcagtctggggtattccgacagccagatcgatatcgcgaccattaaccaactggaggcaacatactggacgccacgcggtgagtattttgattatgtggccgacagcgacagcacgtcggcaaaggacattttcgaccgtatcaccgaagcgggtatgggttacttccttctttcagacggtaagatttctgctggccgggaagggattaagagctgggccgggatgatcaccccacaggaaatgactgaggaaatgcagaccactttccgcgcgttgacagatgatgattttgacggcgtagacgttaaatatattaatccgctgacctgggcagaggaaactgtgcagtgccggacgacggataatccggtaccgcgaaaaattgagtcgtatagcgtagacatggtgatgagcgcagacagggcataccgcattggtatgcgccgcctgatgaaacatctccaccaacgcagaacctactcgacgtccacggagatggacgcgtggtgttatcagtttggtgatcgtcttgtgctggccgatgatattccgacttcagggactatcagttgtctggttgaacaaatggaatatgattcagagaaaatcactctgtttgtgactgagcctctcaaccacagctatgagaacccacgatgttggattcgttttcaggacggcagggcgtcgcgactgctggtaccgacgttaatcgacgattacacgctcaccgtaccctacaacgccgatcttgagcctgaatcgtggatttttgacgatccgagcgttgagccgccgagactgctgttttgtgaaagtgagcagcgcgcgcgacatggtttagttgctgaaatcgcgccctcggataatggcacttttcaggtcactgccccggaatataaagacattttctatatctacgacgacgccacataccccggcgacgtcgcttaataccaaaaaaatccctttcaacttttctttcgctcaaaccctcgtttgcgcgaagcctctttttggagcaaaaaacatggccgaacttaacccgcctttgggaacgacgacgcctgaaatattcctggataacgtcaagcgcgctgacgagctggttaacggtccggccggaacggttaacgaccgcggtggtgaaccgctggatacgtggcgccagatgatggcgaaaaacgatgagatcaggcagaacctgatcccactcagtaagcagtacatgacgcttgaggctgctcaggcggatatcatgaatatcccagatggcagcactacctacgtgcgcagcgcagacggtagttcactggctgatgagtatatcaacaacggcgggatgctggaggctacagggcggaggatgccatctcaggccgcggttgacgatgcactcgcgggcgtcgcggcactgaatctgctcattgctgacagctatctacctcagggatactctggcgctattactgaccaggagggaaacgcggcagcgctgattaacgacgaagggggatttgaaatacctgagttaatcgtcggtgattcttcatctgcaggtgaggatatgcccgggtatgtagaggctcacaccgacgaggagggcaatctggtgctgggtattcgcgattctggtgtggttgagactccggatttgctggccggcagtatcaatatctcgaaagatgatctccctgactggagcgtggcattcaccgacgatagaaataacgtcgcgttgggtgtcagaacgggaggtgaggtagaagcgccggaattgctgactgccgaggtcaacttaaaaaaaacagagacaccgggctgggagattgcctggacagatgaaaacggcaatatagcgatgggtatcagggatgatggctccgtttatccagaacctgagaataatggcattgtagagtttaccgctgccgacacagatgttattgccatcctcggtgacagctatacagatagcctgtttacgctgaaggacaagagctatatcagcaaactgtcctcattgctggattaccggttcaagaattttggtgtttcaggaaataccgccccggccataaaccagcgtctggtcaatcattctgtttattttgatggtaagacattcgcgcaaatgaatgctaaatacgccatcatcatgacctatgcaaatgatgccgcaaaatatatcgcccagagtatggaatactatgcatataacatgagccgtttaatcgactccgttatggcgtatggcgcgatacccatagtcgtcgctgagtggaatatcacaaatcaggctgcggcacagcttaaagctatctgtgaaagccggggaataaaatacatattcaacggcagtctgatgaaagaagtggggaatctggttgtcagtccgttccatcaggggcacccctgcacccggacaaatggtgttatatgggtgtcgatgcatgaggaactaaagcgccttctcccggctaaccgttcaataaaaatctaccgccagaggccgacattctcaccctcatccgacgcagatatgcttttctctgaccgtatcgacttgctgaaaaaatggaaggaaatcggggttcctcaccgctcattaccagacaatattgcacagtactttgaagagatgaacggtcggggtgatgttcgtgaatggacgttcagacctgacgaatatgaccagttgggtgccgcaggcgttgcatttactgaccgtcttctggttaatgtcacgtatccgaacggggcggcaggattaagccaggcaggattcattcttgagtgttctggcgctgtcgatatttatatccgaaatatgctcgatgtagcctctaatatcggtgacgcggtaaatgctgactatctggcgaaatacaaaaatccaccaggcgcatggaaaaaagtgggttctggttccggggaatatattttctctgatgcgctggagatgatcatgtcaggccgccagatacaggtcatgctgaaatccacagcgggtagtctgatgaatatcagggccagatatgcagaaaaatatcaatccgcagcgtggcccgcgcttcccagctacacccctgtgtcagttctgcatggcgaaacctttgagagcatggcgacatggaacgtgagcggagtgaccagtattattccgctggaccaggttaacaccccacgaaacctggcatacaacggacctctggcaacggtagcctcgttgatgacgggttcggtgatgaagaagacgattggcatcacgtcgcctgcagaccgggacataacacaacccctcactctacaggttgagttgtgggggcgctatttcccgaaagcctatctggataacagtatttacaacctcgatcccgaacaggttgttgattcgtctcagccaggaaacaccttcccggtagccagcccgatcaccagtgatacctgtgatttccgcacagtcacgttacggagcgcattcggggcatcaatgaacctgccaaacaccatcgcgcagagggatttcaccgggctgttctggaagccgatgcgcttcattcttgaaataccaccatacgaaaccgtttcacaaatcacgctggagataacgtcagactctgactatatccagctcgccaaaatttttataaaggaagttaaataatgggtactcgtattattgctgtcggcgctgactggtccggaaaagggaagccaaatatttttccgttcgtttcactctcagatgcggatttcgcctacgattttcgcccgcgcaccacgaaatataatgacctgacaaagaaaaccaccatcagtttaatgcggggtacactgtctccaggtaatgcatccatcgctttcagcactgataatacggttggcctggtgagcgccgacggtcagggactgacgattgataatctcggggcggcatttatttccagcattcctaaagcgctggcgctggatggcagtgtaaaactgaccgcgtacgtagtcggtgggtatagtgggctggcgttcccggcagggtcacagtatccgggctcaccggggcagactccgcaaatctgtaatctgtttgattacggcaaccgggtattgaaagaccgcggattcactattgaaagcgatggctatgccagcaacagctctgcgcaatttggcgggcgcgtaaactcgtacaatcccagcgtaggcagccagctggtaggcacaaccagaacagccaaatgtgcaatattcctgacgtttgatggtacaaatttcactgtttacaatgccaccacagggtttacagagacaaaaacggtcgcagacttagggattacagccgcgttgccagtatccgccagcattgtgccggggattggcattggggcaacaggaacggcatccaatgcggcgctatccccgacaatctatcagattgcgcagtggagtcgggttctctcaaaaactgagatggattcgcagtacagcaaaaccagggcagcattctcaggtatcggaatctgagacgtttacgcggctgtcgtgaaaattgacagccgccactcctttcaatgaggcattcataatgacacctgaagagtatctttcaccagaatggagtgacagggaaaaggttcacgactggaaaaactatgccagcgaggaactaaaacgtatctggcatacctttaccgataagcaaaagagagtggtggctgaagccctgactgaggctgctgaaagagaagattgggagtaaagcataccgcctcgcgtttacttttgcacaatgcacaatctaatttttagtttgtgcatttttttatgcctttcaatgcaaaaaaaatgccgcgctacaatttcgtcgacaaaacggcagagcacagcgaaaaccgtctgtggataatggcagagatggaacgagagctgattgtcgagcgaaccagagcgggtttagccgcagcgagggagcaggggagagtcggtggccgtcgccgggtaatgactgaagatgtggtggagcagtgccgcagaatgctggagaacggcgctacccggcagcaggtagccgatgtgataggtgtagacgtgaaaacaatctacaagtacctcccggcgacttgaagacaaagatttcactacttttcctgatatgttacgtttggcttaatcaattcattcagctttgaaaacagtttggtttgttcgtgaacggtaagaaaacaataagttttgagcaatttttaactattaacagcaatcttgtttccatctcagatacatgggctgacttgtgggcgttaatttttcacacgggtttaagcgctggaaggctgctgagtattcgatatgatgatattgatggtgatttgatactgatacgaaaacagggtcacctgaaggagctacgtgttgaatcaacccctccagtggaggggatcattgctcgtagaagagaacgctatccagaagatgtttttttatttcagagccattctaaccgtgtgaagtaccaacgccggccggtcactataattgctttcaacgccgctttacgtcgcgctgctagatcattaccagacgttaacgtaagcagtagtagcgcgagaaacataccggactaagcgcctgtccagtagcgtgcggccgatgtgacaggcgtgggagtgaagacgatttacaaatatttgccagtacaatacggcgataaaaaatccccttgagcaggcacactcaaggggaaaatactacataacatcattgctgtgtgcgtctttgcgctcatctatcttccaagaagatgcctaaagcttccagatatttctggtctgagcagttaaaacattggatcggcggcctatgtgataggagggggtgaagacgatttataaatattttccagccggttaagtttgctcacctgcgaaccgtatgcaagagatcgcaggtgaacaatttgctatgaaggcattgccatagctgaaaaattttaatctcgcattgttcgcaaaaccatcaaacagctaaggcctgaaaacactttcagactaaccttactcgttacatcaatgtgttacgtcaatggcgtaaattgatagccagagcctatattgatatgtcgccctgtcaaaactactgtatataaaaacagtgttaatgtgagcgagactattatgcagttctacactcccgttgagttacgtcagatcatgctgctcccgttgtacagcgaccttgtgcaatgtggttttccaagtcctgcgcaggactacgttgagcaacgtatcgatctgaacgagttgctcgttaaccaccccagtgcgacgtattttgtcaaagccgccggcgacagcatgaaggatgccggcataggggaaggtgatcttcttgttgtggatagctcaaggacagcagttcatggcgatatcgttatcgctgcagtggatggggaattcaccgttaagaagctgcagctgcatccgcgggttcagcttaacccaatgaaccctgcatattcgccgatagtcgtgggtagcgaggatactctcgatgtgttcggggtcgtaacttacatcatcaaatcggctggctgagatgtttgcactttgcgatgtgaactcattttacgcatcctgcgaaactgttttccgtcctgacctgaaggggcggccggtggtcgttctgtcaaacaacgacggctgtgtgatcgcccgttcgcaagaagcgaagcccttcgtcaaaatgggggagccttttttcaagcaaaaggacatgtttcgccggcacggtattatcgcgtttagcagcaactatgagctttatgccgatatgtccaaccgagtgatgacaacactggaggaactctctccacgctgcgaaatttacagtattgatgaggcattttgcgatcttactggtgtgcgaaactgtcgcgatcttaccgactttggcagggaaattcgcgagacggttctgcgcaggacgcacctcacgatcggcgtcggcatagcccagactaaaaccctggcgaagctggccaatcacgccgcgaaacagtggcagcggcagaccggaggagtggtggacctgtctaatctggaaaggcagaggaagttgatggctttgcttccggtggatgaggtctggggcgtcgggcgccgcatcagtaaaaaactggaggccatggggattaaaacggtactgcaactggcggataccgatatccgttttatccggaagcattttaatgtggttctggagagaaccgtgcgggagctgcgtggcgaaccatgcctcgggctggaggaattcgcgccagtaaagcaggaaatcgtgtgcagccgttcgttcggcggccgtatcacggaataccatgagatgaggcaggcaatatgcagctatgcgtcgcgcgcagcggagaaactccgtggcgagcatcaatattgccgatttatctccgcatttgtcaaaacgagtcctttcgcgctgaacgagccgtattacgggaacagtgcatcagtaaagcttcttacaccgacccaggatagccgggacatcatcaccgcggcgacaaaatgtctcgatgcaatctggcgagacgggcatcgttaccagaaagcaggagtaatgctgggagatttctacagccagggcgtagcgcagctcaacctgtttgatgacaacgctccccggaaggggagtgagaaactgatggaagttctcgatcatctcaacgcgaaaggcggaaggggaactctgtattttgcagggcaggggatccagactgcctggcagatgaagcgagaaatgctatcaccacgctatactacgaggttttgtgacctgctcaaagttagatgattcggccattaacggtagtggttatgctgttactacagtccgcttagagcgaggagctcacatctgccacctcaaaaagaccgcaaatattcaaaaatttaatggttgattttgctgggatacttctctcattaatgaggggcacatagagatttatatggcgagcctctttctggcactagacgggcaagtttctcgccctagtagtcaatgcttcaattttgtttatgttgttctgaagcctttccagttcagtcttctcaatgccgtcccatagcttcaaatgacgctgatataaggaccacttaagtgagtgaaaaccattccaggctaatcccatccaggacgcgtaattggcattaagaatattaccggtgatatacattttacctgcattaacagcactggaagttccgtaacccaaggcaagcatcatcctgaagcgtggatttagccgcattggcatcgtatccattaaggtctctccaaaagctcctttacccagcgatacctgtttcgctacatagaaaacccgcatcaaaatttccattatggtcatcggaatactcgtcacgataaactgacggaagtcatacccgttgacatacatgtactcgatttgttttccaaaattagaactccctacagggatgccttcgagcatacgaagtagccccataaagggggccggtagacccatgccacggtttccgtttgctgagggggcatttacatccgatgcaaggtgtccaaacattctggcaatgagtctgaaaatattggtttcgtccgttacgcctttcttagagggataaaccactatttgaccatcctgaaccaccgtacacgtcccgttcagcatatcctttatgccgaaaataatgcccagtatgggatcatgcgacaaagcacgtaagcgatgatttgttggcgacaaaacgctaccgcttgcgtccactaaatcactggtaaccgaactgtctggtgcccctattcggaacatgtcggatagttttttactgacatcctccggtaatatggcattaaaggccttctgcacctgtttattgaaaataccatcaacttctgctgtatagctcacggtaggctttggcggggctctgacgcatagtaaatccagcatggatgctatgatcccgcaaccgcaggcaatagcataatcccaagcgtcaagcgcgtagcggtcattaaactctttaatgtgattctggatccgggcatctacaacagccagatcatctgtggcaagtatgttggccagaccgatgtcaccagagacacgctgagaagcttcgctatggatagtctgcaaggtagtagaatgtatggcggcatcagagggggtcatttctcgcaaatgaagctctttgagcgccttatgcacagattcatcaagttcagaaccgctaatgagcccagacagttgcaccttaaggctctctatatcactgtttattgtttcgtgaacgctcgagatgtccaggccacgaagctgaatatagcggatggccctgagttcatcattatattgagactgactcatgcatttacctcaccgcgactaggctacctttgggggcttttttagaaagcatatcgatcgtcgccttgatgccagcaatttctgccttaaaatactcagcgttcgacattaatctttcctgaacatcgtagagcttttgaatggcctgactaagtgcggctgttagtttcgcattttttctgtgtttgaataccgcgtatccgccaattcctaagattgctacaggcgcggccagaaccccgattcctgccaccatgccaccgccgacgatagagcctgcggtcgcaagcccggaggttatacctgctgctgaaacgcccgttgttccaagagtataaagagcaccaaaggaagccgcagcgccgacgcctgaacccgctaatgctgcaacgccctcagtaatccccggaaagttattttcaagcgcctgaagagcgccctttacttcattcattgccttctggcgaattttttcgagctcttcagattcagtagcgtccacataggcctcacatttaaaaattgctgtgtatctggtgaaaaatgcaccataaaagtgatgcaggaatcatgacttactattggcgtactctccagttcacgattgtgagttctaatgagttttattgatagtgaatgcatacgccttcaagtttttacccgaaaaaactacttcgaaaacagaccgtgctaaaaatcagcagatgattgaacagacagggttggacatgaatgttcttttttgccaaacatttcaccaatcaggctaccgattacataatactcgtccccgtcggatatgatatagggcccacctgagcatccttgcctgttgttatgtgaaattacaaaacgagatgtgtaatgctggccacggtgattttcacaatcttcgataaaaatactttgaattttgccaaagacagttgaaagtacagtctgacccagtggatatcctacaccgaatgtatgcatattctctttgggattacgcgctttaaaatactgggatacaggctgtttgatattagctggtaacttcatttcagcactatctacaaacggataattgtctttaaagttgttactgtcattacagttattaagaatgaaatcgacaggaacgggcacagtattcactggtccgagatgattatggaatatgacataaagtttttgggtattgctactggggtactcctttccgagagcatcagtaacaacatgggctgcggtgaggacttttagctgttccttatcattgaagccaaatgcagttgcttcgagatttttactaaagctaggatctttactcacatagattttgcagacgtagttttcaagcattttgcttccttatcaagatttagatacccaacaagtcatacggctgaagatgttaatataacgcattggcgctgtaagtgtaagtatccctgcaaaactaatcatcaacctttagagagtctctggcagccccaactttcgcttttggcacattccggacgtcatcaaagctacaggcttttggtagcctcaatcaattcaggcccctgattcttcacgttacccaccgcgcgtgaaactgggtgccaggtgaaatggtctgctgacatagcgccatctgcaattatttcctctgcctctttacctccaacatcctgcctcatccattcacgggcggcttccggcgtcagaaccagcggccggcggtcgtgaatatcgaccaacccctgatcggccgcagcggtgacaatcagaaagccttcggcttcgtctccacgttcaaatggtgtactcccgattgccgccatgaatatcggctggccatcggcacgatggataaagtagggctgcttcttgtcgccttcttttttccattcgaaccagccattggcaaagcagatcgctcgaccgtgctgccaaagcggtttaaacatcctgctggtggctgcggtctccacccgggcattaatcagcggtggtttatcccaccaccctggtgcgtaaccccagtgaacgggatcgagatgcagttgctcatcgcgttcgctcaggagcaaaactttagtcccaggtgccacgttgtaacgcccaattggctcaggatcgtatgcaatgtcgcgctcggcctcttcagccaaataagccaggtactcttcacgggtttgggcttgtgcaaaacgtccacacatagaaacctccagtcagtaagactaaaagtatagacgttgcgagtgatggccaactgatgggttttcctagggaaggccgttatcatgaaagagtggtgcgcaccgaaaattacatgattaacgcaggagatgatgtcatgggaggatattgtcgtaaacatgcactttttctttctagaaagctgctcgcaaaagaggggcatagaaggggcatcggataagaaaaaggggcaaaaaagggcattaaattcgtaggctggcgtcggttggcgttgttcgtatggagttataactgactgtattagaagataaaattaataaattcaggggcttgaaattatttgggaaacttatcgatgttgtacttttcttttttactgatttcttggttttgcagcatgtaatagtggctcaattcatagtgtggcatcagaagagcacgcattctgccagccgctgaacaacgtggcgctggcgcgtagcaattattgaggtttgacaggcaaccgtggcgtgtatggtacggattcaggggcggaatgtcagcatctttccggcactttcggcagcgagcagccaggcgggggcggctgatgcggaaataaaaagcccgccgggcggcgggctgcggcgttagcggaccactagtaccgagcactcggcgtgacgaaccaccgcggcggcgttggagcccagcagataagttgtaatatccggtcggtgcgaagcgatgatcaccaggtcggctggcagcgacttggccagcgcaaggattttatcttttggcgatccttccgcgacgtgaaaatgcatccggtcttccgggatggagaacttcttcgcgatctctttcaattgcgtttcagaaccctcacgcagctcgtccatgccgggaagctcagcggtataggccattcccagtgaggcataatagggcagagaagggatcacggtgaggaaatgcacctcggcgtcgtcaatccgcgcttccgattcaacgtgactgataatgcgttcagtaaattctttatcagagatatcgatagggacaagaatcattctgctcataaaacctcctgtttaagtatcccttcatattgtacggtattagggcacgttttgtatcatgaccgcagtcacactttgacattaacgtagcttgcgttcgggaaattttcctttgatcaccccgtcataataccggccttttgacaccacctgtaaaaaatcatgaaaaatacgcggtgggaccccggtatattgtaatggcggctggtgatagaaatagatttccagtgtggcggaggcgtcatcgtaggcgacggagataattcgtgaagattttaccggatggtggtgcatgatggacgtcctcgggcaagcactgactggccatgactatatcattaaacggacggctattttagtccgcgagatatagcgttttgttttatctgcagcgaggcgggagggggaaagcccgccggaaccggcgggcaggcgcatcagaactggtaaaccaggcccagggcgacgatgttatcggtagagataccgttgtcttcgtagaatttgtcgttaccatccagcaggttgattttgtaatcaacataggtggacatattacggttgaagtaataggtcgcgccaacgtccatatatttgaccagatctttatcggcatagcggccgttattgtacagatctttgcctttggactgcaggtaggagatggccggacgcaggccgaagtcgaactgatactgcgcggtgacttcgaagttttgcgttttattggcgataccgccaccgttggtactgctggtagagccgtatggcgtcatattgcgggtttcagagtacatggtcgccaggtaaatatcgttggcgtcgtacttcaggccggcggtccaggcgtccgctttgtcgcctttggcgtatcgttcggtgtgagtatagtgttgctggtcgcctgtacggtcagacgaggtgtaagctgccgccgcgctgatgcccatgccgaagtcgtaggaagtggagaggccgaaaccatcgccattgtcaaagcgaacatcgctgtcgctgctgcggttattggtgccgacgttgatatcctgcgcgttctggccttcgtttttaccctgatactgcagggcgaagttcagaccctccaccagaccgaagaaatcgctgttacggtaggttgcgacgccgttggcgcggcctgccataaagttatccgcataggtgtaggagtcgccgccgaactccggcagcatatcggtccagccttcaacgtcgtacagcacgccgtagttacgtccatagtcgaaggagccgtaatcgcccactttaataccggcgaatgccagacgggtccacgcctgatcgctggaggtctcggtgttgttggcctgaacgttatattcccactggccatagccggtaagcatatcgttgatctgggtttcgcctttaaagccaaaacgtaaataagtttgatcgccgtcttttttcgagtcgctggagaaataatgcagaccatctaccttgccatagagatctaatttattcccgtctttattataaatttccgccgcatgcgcggcaccggcggctaataaagccggaataacgagggccagtacttttcttttcatgaagaaattcctttaactgtttttatgttttaacttccgggtgggaagtgaactcatgctaaaggagcggtctgagatccggtaagactcaattgttacgatataagtaaaatctaaaataaataataccaatgaaatggtgataattatgctgaatgcatttatagataatatacaaaataaaaattatacatgcccgggctaatcacgtattatttgcgcgttatatgcctttattgtcatgccaataatttattgttgccgtctcattctgcggaatgatgttgtttatcggtaaaacgacaagcccgaacgttgtgttcgggctttttttatggacaaaggtgacggggcggttaaccttcgcttggcgatttctccgctttgccagccagctgggcgagaaagtcatagcgcttctgcagatcggcggcggcgtctttccatagctgctccgccacttcaggctgctgggcgttcaggcggcggaaacgttgctcattaagcagcgtctcggccagcgcgtctgatggcggacgggaatctagcgccagcgggatcttgccttcatctgcccgacgcgggtcgaagcggtagagcggccagaagccggtggcggtcagctgacgcatctggtcgtggctgagcgccagatcgtagccatgctcttcgcaagggctataggcgatgatcagcgatggccccggataggcttccgcttcctgaatcgcttttaccgtctggttcagctgcgcgcccagcgaaatttgcgccacataaacatgaccgtacatcatcatgctgacgcccagatctttacgcgccttgcgtttgccatgctcgccaaacttagtcactgctcccagcggggtggcttttgacgcctgcccgccggtgttggagtaacactgggtgtccagcaccagaatattgacgttttccgtcaggctcagtacatggtccaggccgccgaagccgatatcgtaagcccagccgtcgccgccgatcagccagacggatttctccaccagcgcgtcggcatcggtcagcagctcttcagctcccgccacgccggccagcgcctgacgcagggctgccacctgttcgcggcgaacttccggcgtcgcctcggcgtgcagcgccgcgttcagctctgccggcagcttgtcggcgaattcgctcagcaggcgcaacacgcgctggcgatgctggtcgacggtcaagcggaagccgagcccgaattcagcgttatcctcaaacagcgagttggcccatgccgggccgcggccgttggcgtcggtagtgtacggtgtcgagggcaggttgccgccgtaaatggaggagcagccggtggcgttggcaatcagcattcggtcgccgtacagctgggtcagcagtttgatatacggcgtttcgccacagcccgagcaggcgccggagtattcaaacagcgggctgatcagctgtgaggtgcgaatatcaatgcgctccagtttgctgcggtcgatttccggcaggttgaggaagtactcgtaattgaccttctcctcttccacatgctccaggcgggacatcatattgatggccttgatctccgggttctggcggtctttcgccggacacacttcgacgcacaggttgcagccggtgcagtcttccggggcgacctgcagaacgtatttctgcccgcgcatatcgcgggatttcacatccagcgaatgcaggctggcaggggcgttctccatctcttccggggcgaccactttggcgcggatcgccgagtgcgggcaggcggcgacgcagtggttgcattgagtacacagcgcttccttccagatggggatctcttcggcgatgttgcgtttctcccagcgggtggtgcccatgggccaggtgccgtccggcggcagggcagagaccggcagcgcatcgccgaggccggccagcatcgcggcggtaaccgttttgacgaaatccggcgcggcgtcggagaccaccggcgggcggttcggactgctggcgttcaccggctggagcggtacttccgccagtgattcacgggccagggccagcgcctgccagttgcgctccaccagctcctgacctttgctgctgtagcttttggcgatggctgcctgcagttccgccagcgcgctatcacccggcaggatctgagttaaatggaaaaaggccatctgcatcacggtattaatgcgcgccccgaggctgcattcgcgggcgatctttgccgcgttgaccacgtaaaaacgcgcttttttctgattcagggtggcctggacttcctggggcaggcgggaccagacctcatcggcgctgtacggcgtgttgagcaggaaaatgccgccgggcttcagccgctcggccatctggtatttatcgataaactgcagctggtggcagccgacgaaatcagcctgcgaaatcagatacgatgaacgaatcggtttttcgctgacccgcagatgcgagacggtgaggccgcccgctttcttcgagtcatagacaaaatagccctgggagaaccatggggtcgagttgccgatgattttgatgttgtttttggtggctgacacgctgccgtcgctgccgaggccgtagaacagggcctcgagcttggcctctgccggcagggtattttcgcccagcggcagcgacaggttggtcacgtcatcatagatcccgacggtaaagcgcggcttcggctgggcggcctgcaattcactgaatatcgccagcacgcattccggaccaaactccttggaggagagaccgtagcggccgccgatagtgcgcggtagcgtctcgcgctcgccgcggttaaaggcttccgccagggcggtcatcacgtcgaggtaaagcggttcggcaagcgcgccgggttctttggtgcgatccagtacggcaaccgcgcgggcgctttccggcagcgccgccagcaggtgggcggcggagaacgggcgatagaggcggacttttagcacgccgactttctcgccgcgactcagcaactcatcgaccacctcttcgcaggtgccgatggccgagcccataatgacgatcacgcgctctgcctgcgggtggccgtaaaactcaaacggtttgtactgacggccggtggcggcagcgaaatcgtccatcgctttctcgacatggtcatacaccgcgtcgtaccacggattggtggcctcccgggactggaagtaagtgtcggggttggccgaggttccgcggatcaccgggtgttccggattgagcgcgcgctggcgatgctcagcgatcttatcctgcggcagcagggcgcgaatagtgtcatccgccagcggggcgattttgttgatttcgtgcgaagtacggaaaccatcaaagaaatgaataaacggcacccggctttgcagggtggcgatatgcgagatcagcgcgaaatcctgcgcttcctggacgctgctggcgcacagcatggcgcacccggtctggcggacggccatgacatcggaatggtcgccgaagatcgacaacgcatgggtagcgacagtgcgggcggcgacgtgcagcacaaacggcatcagctggccggccagtttgtacagggtggggatcatcagcagcaggccctgcgatgaggtaaaggaggtggagagggcgccggtctgcagcgcgccatgtacggcgccaatggcgcccgcctccgactgcatttcgaccacgcggggaacatcgccccagacgtttttcagcccattgccggcccaggcgtcagcctgttccgccatcgttgaactgggcgtgatcgggtagatggcgataacttcactggtgcgaaacgcgacggaagcgaccgcgccattaccatcaatcgtaatcatatgaagacacccttacattgcgcaaaagaatggacgcgtgaaaccgcgacgcgccctgtaattatataaggggtagtttagcaaaccgctgaccccgccatttttgcatttgtgtcctcaatgcgccgggtacccgtgaccagatcaatattttgcgtggttcgcggagaaaatggctgcctgccgggagaggaaccacctgcgtcgggcgacatggccgaggcagatcaagctttcggcgaaaatttgctagaaaatgttaatgaggcgcataaatacgtacttcccctctcgacgccgcccgccacgctgcctattattctggggtttgcttttttaagaagtttctgaggggagagagaatgcgagctgcgatgttagtaggatgtgcggcgctgttgctgtccgcgtgcagtagtgaacccgttcagcaggccacggcggcgcacgtcacgccgggaatgcgggcggcgatgagcgacgccggtcaggccaactgcgccatgataggcggctcgttatcggtggctcgtcagctcgatggttcggcgattggcatgtgcgcgctgccgaacggcaaacgctgcagcgagcaggcgctggcgggcggcagctgcggctactaacagcggccccgtcgcggggcagcgtcagcggcacctcaacgccggctagtgcatcaggtcggcgagcttatagaccagcgtctggtcggcggtcgccagcgtcaactggttttccgtcagatcgacctgcgcaccctcgcgcagcatcttgtcgatcgtcgcatccagggtattgagctgggcgtcgtggcacagcatccgggtcatcgccagcgatttgaccttcagctcgccgtccgacactttaccttccccgctaaagccgttgcacatattgccggatacatacatcttgcccgttatagccatcttctcaccgaagctcagctccagcggccggtcgctggcgttgaccgcctggccgttgacgctggtcagcacgaaacgatgatgctgcagctgttccgcaccggtggacaccttactgttatagacacagccggacagcagcatacctgccgccagaagcgccgcaaatttgttcattttcactccaaaacattcacataactaataaaaccaagccagtgtaacggtatcgcagcggggatctgtggggattatctgaatgtgctccccccgggagaggagcacaaaagggaaaggcattagacgatggcgttcggacaggtttcgccgttggcgacctgctgcaggttacccagagtggtctccgaaatgctgatcagcgcctcggcggtgaggaacgcctggtggccggtaaacagcacgttatggcaggcggagaggcggcggaagacatcgtcctggatcacgtcgttggatttgtcttcaaagaacagatcgcgttcgttctcataaacgtccagccccagcgcgccaattttctggtgcttcagggcgtcgatggccgcctgagagtcgatcagggcgccgcggctggtgttgatcaccatcaccccgtctttcatctgatcgaaggcttcgcgattgagcaggtggtagttttcgtcggtcagcggacagtgcagggagatcacgtccgattccttgtacagcgtggcgaggtcaacatattccacccccagctccagcgcggcggcgcttgggtacgggtcgaacgccagcaggcgcatgccgaagcctttgaggatccgcaacatcgctacgccaattttcccggtgccgatcaccccggcggttttgccgtacatggtgaagccggtgaggccttcgagggagaaattggcatcgcgggtacgctggtaagcgcggtggatgcggcggttgagcgacatcatcataccgatcgcatgctcagcgaccgcttccggagagtaagctggaacgcgcacgacgcgcaggccaagctcctttgccgcctcaaggtcgacgttgttaaacccggcgcagcgcagggcgatatatttcaccccgtgggccttcagctcttccagcaccgggcggctgccgtcgtcattgacgaagatacataccgcttcgcaaccgttggcggttttggcagtcttcgctgtcagcaggaaatcgaagaattccagttcaaagccgtatgcatcattaacgtgctgcaggtactttttatcgtactgcttcgtactataaaccgcgattttcataagacttttctccagtgattataccgtcacggtagcatatttaaaataatcgtacaattattaaaaaatagtttaatgagagggtgctaatcctaattctagagcatatcgcggacttgcggaatctctttgaaagccaaagttttttcaccacaaactgaggctgaaagcgccgggggcgagcagcagaagcggccacagcagaccggagctgacgttagccagctgaaacgaccacagcggcagactgctggcgccgctaacgaagggcagcgtagccctcaggggagagagaaagcggctgaaaaagatagcccacgggccatagcgctgaaagaagaggcggctgcgggccagacgctcggcggtcagccagcgtagatgggtgaggcgatgacggtagcgaatgcccagccgccacgatagccagaatccgccgatggcgccgaggctggcgctggaccacattaacaggaaatgtccgaggctggcggaagcgaatgttcccagcagcagcaggccggaggtgccggggattgccagcgagaccaatgcgcaggatttagtgaaggtaagcagaaaaacaatcagcaatacccatggatagtggtcctgtgcgctctctatgagcgagataattaacgacaccgcctctcccgcaagctattcccgtctggctggagtgtggcaggggcgacttaaacaacagttaaatgataatggccgaacgtcgcgccgcgagtccggctggcaactatgctttaacaggccgtaaactttcactcactggtcgaacgtgtcacaatggacgcctttcggcttttacttatgttgaatcaggatattaactgcccatgaagggtaaatataaagccgccatcgcgctggtgttagttctggtgttattgccgctaaccctgctgttgacgctaacccactgggtgccgacgctggcgggcatctggctgcccgtgggcacgcgtatctctttgcaggagagcccgcgcctgacgcggtcggccctgctgatccccgatctgcgttatctggtgggcgactgtgaaatcgcccgggtgaccgatgcccgtctctcgcgtcccagccgctggcggctgcatattggccagctggagatcaacagcgcctgcctgagcaaactgccggccagcgatccctctcccggttcaccgcgcacgcttgccgaatggcaatcgatgttgccctatagctggttaaccattgacaatctgcggctctcgccgtgggagaaatggcaggggcggctggtaatgtcattaacgcctgcgcagcaggatatcggctttgccgggaaggaactgagtctgcaggcgcgcctgcgcggccaggcgctcaccgtcagccagttcagcgcccggctgactgacgatcagccgccggtgaagttggtggggaccttccatctgccgctggtgccggatggtctgccggtcgacggccagatgcagggcaccttcgaattcccgcagactgcggaatggatcgatgctgagctcgagtggcagcacaatcgcggccagctgctggtcaccccgcggggtgaggtagagcctattctggacctgccgtgggagatcaccccggagcggatcaccatcagcgacggccgctggcgcacccgttacgaggcgtatccgctgcgcgggcgggtggcgctgtcggtgggtaactggcagcagggcaccgaacagatgatcgtcagcggtcgcctgaatgttctcaccgagggtcatgccgggaagggcaatgcggtactgaatattggtccgggcaagctgagcatggataacagcgatctgccgctgcggctcaccggcgaggccaagctgggggagatgatactatacgcggcgctgccggctcagctcagcgggccgctgatcagcccgcagttggcttttcaccccggtgcgttgctgcgttcgcgcgggcgggtgatcgacgcgctgaatattgacgaaatccgctggccgctggccggggtaaaggtcacccagcagggcgtcgatggccgcctgcaggcgatccttcgcgcccatgagcagcagatgggcgactttacgctgcatctggacggtcaggcgagcgattttctgcccgacagcggccgctggcagtggcgctactggggcgagggacattttaccccgatgcaggcgcgctgggatgtgaagggcagcggggagtggcgcgacaatgctattaccctgagcagcctctccaccggcttcgataagcttgagtacggcacaatgcgggtcagcaccccgcgtctgaccctcgagcagccgatccgctggctgcgtgatgctgagcatccgcggttgaccggcgcgctgtcgctggacgccgccaaaaccaccttctccggcggcagctatctcccggcctcaacgctgaaattcgccctcgacggtcgggacccgacgtggttccagttcaccggcgccctgcatgccgaggctatcggtccggtgcgtctgtccgggcgctgggacggcgaacggctgcgcggccaggcgtggtggccaaaacagtcgctaacggtgttccagccgctggtgccgccggactggaagatgaacctgcgtgaaggcagtctctacgcgcaggtggccttctcggcggcagccgggcagggatttgaggcgggcggccatggcgtcctgaagggcggcagcgcctggatgccggataaccagatcaacggcgtcgatttcgtcctgccgttccgcttcagcgacggtcactggcagctgggcatccgccgcccggtctccctgcgcattggcgaaatcgtcaaccaggtcaccgcgcgtaatctgacggcggacctgcagggcacctggccgtggagcgaggccaatccgctgcagctcagcgacgtcagcgtcgatctgttaggcgggaaactgacgctgctgcagctgcgtatgccgcagcgcgacccggcgttgatccgcctgcagcatatctccagcagcgaactgaccagcgccgtcaaggtgaaacagttcgccatgtccggcgcggtgagcggcgcgttgccgctgtggctggagaataatcaatggatcatccacgacggctggctgcgcaatgacggaccgatgaccctgcggctggataaagacaccgccgatgcgctggtggcggataacgtctccgccggggcggcgattaactggctgcgctatatggaaatctcccgctcgtggacgcagattaacctcgataatctgggcgtgttgacgcttaaggccagcatcaacggcaccagccgggtggaagggaaaagcagtaccgtgcatttaaactacgctcatgaagagaatattttcgacctgtggcgcagcttgcgcttcggcgacaatttacaggcgtggctcgagcagaatgctacgctgcccgtacggcgctgtacggacggtaagacatgtaaggaacctaaatgaagaagctgttactggccatggtggcgtcgatgctgctcgccggctgtacgccgcgcatcgaaatcgcggcgtcgaaagagcccatcaccatcaatatgaatgtcaaaattgagcatgagatccatatcaaggtcgataaggatgtggaaaacctgctcaaatcccgcagcgatttgttctgaggcgacgatgagaaaacgactgttaaccgcggcgctgacgctggctttactcagcgcgcccgcgctggcgttgaccctgagcgaagcgcgccagcagggacgagtgggggagacgctgaacggctatctcgcgccgctgcgtcaggataaagagacgctggcgctggtaaagcagattaacgccgcgcgcagcgaaagctaccagcagctggcggatgacaacaatctgccggtggatgaagtggcgaaaatggccgggcagaagctggtggcccgcgcgcagcccggggagtacgtccagggattgaacggccagtgggtgcgcaaataattagcgacagcgcttgcggtattcccccggggtgacgccaaagcgctgcttaaaggcggtggagaaatggctgtggtcgctgaagccccagcggtagccgatccccgccagcttttcatcgtcatggacattctgtaacgcctgggcacacagatccaaccgccggttcttaatatactgcgccaccaccagcccctggtcggcaaacagccggtacaggctgcgtaccgacatgcccgtctcgctggccagccactccggacgcagatgctccgactgaatggacgcatcgattaacgcaataatcttctgaaactgcttttcccgccgggaaggggcaggatcgcgctgatgcagcaccgggcgcaacaggcaggcgatcgcctccagcgcggcttcgctctcgctggcggagagcgtcgtgccgcccatgctttccagcagcagtcgctggctgagctggaccattggcagagatttgtccagccggcaggcggtagtgatgtcccctgtgggcgccacccgctggcgcggcagcagcagcgaggcctgacgcgaggtctgctgccagacgatggagcatgggcgggcggcgtcgattaacgtgatatcgcctgccgccagcgtcacctggcgatcgtcctgttcgatgatggcttcgccggcgagctgaaacacggtatagaaccaggcgtcgttatcgcgttttatctcattgcgcgtgcggtagagattgacgccggcggcggtgacggtactgaccttgaggctgccggcgtagcgggcgtcaatctcgccgtggaaactctcctccaacggccgggcggcgaaatggccgcagacctgattgatcgtcgccagccagcgctgatacgccagccctccctctgccgtggtcatcattcgcccttctcctgtaataacaatgtttccgcattgttgcatttgtgtcgcctcaggcaagggcgcgatggcgggtatatgaaagaactattacccgcggcacatttctgcgagggcagacgacggaattgcggcgactgtcacagcggcgcaaacgaatgtcacagagaaaaaagcgccaaccgccaaccagacatagactgaaagcactatccgcgatgaataaggaaagggtatgtccacctcacagatagcgctgcttgccagcgtccagcagtttttagaccgtcagcatggcctgtatatcgacggcgccccctgcgccgcgcagagcgaaaaccggttaaccgtctgggatccggccaccgggcaggcgattgccaccaccgccgacgccagcccggcggatgtcgaccgggcggtgatgtccgcctggcgcgcttttgtcgatcgccgctgggccgggcgcaccccggctgaccgtgaacgcatcctgctgcgttttgccgatctggtggagcagcacggcgaggagctggcgcaactggaaaccctcgagcaggggaaatccattgccatctcccgcgcctttgaggtcggctgcaccctgaactggatgcgctacaccgcggggctgaccaccaagatcagcggccggacgctggacgtttcgatcccgttcccgcaaggggcgcgttaccaggcgtggaccaaaaaagagccggtcggggtggtggcgggcatcgtcccgtggaatttcccgctgatgatcggcatgtggaaggtcatgccggccctggcggcgggctgttcgatcgtcatcaaaccctcggaaaccaccccgctgaccctgctgcgggtggcggagctggcgacccaggcgggcattcctgacggggtgttcaacgtggtcaccggcagcggcgccggctgcggcgcggcgctgaccgcccatccgcaggtggcgaaggttagctttaccggctcgacggcgaccgggaaacagattgcccgcgtggctgccgaccgcctgacccgagtgacgctggagctgggtggcaagaatccggcgattgtgctcaaagacgccgacccccagtgggttattgaggggctgatgaccggaagcttcctcaatcaggggcaggtctgcgccgccagctcgcggatctacatcgaagcgccgctgtttgacaccctggtcagcggcttcgagcaggcggtgaaatcgctgcaggtggggccggggatgcaggagacggcgcagatcaacccggtggtctcccgggcccactgcgacaaggtggcggcctacctcgaagaggctcgccagcagaaggcagagctcatcagcggcagcgccggaccagatgcgggagggtactatattccgccaacgctggtggtaaaccccgacgccggactgcgtctcagccgtgaggaggtttttggcccggtggtgaacctggtgcgagtggccgatggcgaggaggcgctgcgcctggccaacgacagcgattttggtctgaccgccagcgtctggacccgcgatctgacccaggccctgaactacaccgaccgtctgcaggcgggaacggtatgggtcaacagccataccctgattgacgccaacctgcctttcggcggcatgaagcagtctggtaccggccgcgatttcggccctgactggctcgacggctggtgcgaaaccaaatccgtctgcgtgcgctactagccctccgtcggggaaggcgaaaggcttttcccgacgcgccgcttgccgacctccggtctttctcgctactgtggagggcaatctttgcctaatctgggcggtgaatcatcaggaggtcttcggcatgacagcatttcctaaggttgcgctaattggtcccggcgccatcggcaccacgattgccgccgccctgtttgagagggggagggcgccgatggtctgcgggcgtaccgcccattcggcgctggtgctgcgcactgacgagggtgagatcgtggtgcccggcccggtgcacaccgacccgatggcgatagccgcccccttcgacctggtctttgtcgcggtgaaaaccacccagacggaggccatcgccccctggctgacggccctgtgttcccctgacaccgtggtgtgcgtgctgcaaaacggcgttgagcagcgccagcagtttgcccccttgaccggcggcgcgacggtgctgccgtcggtggtctggttcccggcgcagcgcgatgccgatgcctctgtctggttgcgcgccacgccgcgcctgacgctgccggatctgccgggggcagagcgggtgcagcaggcgctggcgggaacccgctgcgcggtggacctggcggctgattttaccaccgttgcctggcgcaaactgttgcagaacgcggttgccggtctgatggtgctgaccggacgacgcgccgggatgttcgcccgggaggacatcactgccctcggactggcttatctgcgcgaatgcctacaggtggcgcgggcggaaggggccgccctgagcgacaacgtgccggaggagattatcgccggctttcatcgggcgcctgccgacttaagcacctctattctgatcgatcgcctcaatggccgaccgctggagtgggatattcgtaacggcgtggtgcagcgtcgcgggcgtcagcacggcattccgacgccgctcagcgatatcatcgtgccgctgctggcggcggccagcgacggcccgggctgacccgggctggcgcggggttagtccaccagggagggatcgaggtcgatcatcaactgcttcatctcggcaaagtgctgcctggagaaatcggcaatcttctcccagtcctgggcggttttttccgccaccgcgtctgacagcaccttcagcggctggccggttgaccaggcggtgatcaggatctgacaggcgcgctccagggtccagatatcgtcgaacgcttcgccgatggtcggggcggtcaccagcaccccatggttgcccatcagcagacggcgtttatccgccagcagccccgccagccgggcgccttctgccgcggtgtccgccatcccgccgtacagggtatcgacggcgacccggttaaaatagcgggccgtgttctggtcgataggcaggatctgcggcgtcgccagacaggcgaggctggtggtgtacaccgggtgcagatgcagcaccacccgcacgtcgggcagtcgctgatggatctgcccgtggatggcccacgcggtggcatcgacgtcagggcgcgcggcgcaacgttcatcatcggcgttcagcaccagcagatcgctggcgcggatgcgcgaaaagtgtttccacttcgggttgagtaaaaacgttttcccgtcagcggagagcgcggcgctgaaatggttggccaccgcctcatgcatgccgagatgggcaatgatgcgaaaggtggccgccaggtcgttgcggatctgctcttcatcggaatcgcgcatgggcattattccgctttcggcatcagggtctgcagatcgtccgccgtcggcgcctggaagtgatatttcttcagcagggcggcatattccggcgtcgcgctgtattttttcagcgcctcttcgagggcggttttcaccttagtattgccttttttaacgccaaagccgttcagcaccggatagatcagcgtgtcagaggagataaccacccgatcacccagtttttccacccccccgcgcgccacggcggcgtcggtgatctgcgcatccaccgcgcgcgacaacagcgcctgggtggtctgcgggtcggtggtataaacgctcagcgcaattggcttcagccctttcttcacgcagtagtcggcggaaagcttctgcaactgcgccagccacgaggtggcgcccatcgagccgattttatgcccgcagaagtcttccggcgtcttaggctggtagtcgctccctttgcgggcgaggatcgcctccccgcttttcaggtacggcaccatgtcgatcaccttcaggcgctcggcggtaatgtacatcgacgagttggtgatatcgaagcgcccgccctgcagcccggggatcaggttggggaagcgggtatcgatattcactgcttcacggcccatgctcttcgccaggccgttgagcagttcaatatcaaaccccgccggcttattgttctccatgtactcgtaagggaaaaaggtcatgtccgaaccagcggtgatcttaccgctttgctggaaggccagcgcgttcagggatgtcagagcagccgctgcgcagagcagcagggtcagcgggcgtggtgcgaaaatgcgtgtcataaaacctccggagtgtgggcgaattacatgctggcgcgatcggcgccggcctgctgaacaaaaaacgaagcgccgtgcggcttctgcggcagacgaagctggttattggtgctgcgcaccagaccgctctcttccccggccaccagctggccggcatggcggctcggcagcgggttttcgccgaagggcagcgcatcctcggcggcgtagacgctgatgaacagggtgcgcggcagggcggtctcgttggggctggaggcgtgcagcaggcgggtatgcataaagcagaccgagcccgccgggccaaaacaggcctgcggctgctggcagtgcgtcgccaccacctcatcatccaccgcccccgtgaagcgcccctcctgccagtgggtccacagcggcccctgatggctgcccggcaccacgttgagcgggccattctccggcgtcacctcgctgaccatcagcagagcggtgatgatgtcgtcattgctgtgtggggtgaagaggaaatcctgatgccatttcacctcggtggcggtgtgcggcagcttggagttaattttgctgtgatgaaagcgggtgccgctgccgccgatcaactgcgcggcgatggtagccatccgcgaattcagcgcagtatggcgataggcctcggagatctccgtcggtgaggcgacccggcgcagcgacggatggtcgggagcatggtcgcgttcgatatcgaaacgtggccgcccgtcgagggtttctccccacaccgtcgcgtgaccgcggctctcctcgacccagccgtcgaaatcgctctgcagggcggcgatgtcagcgctggaaagcacttcttcgaccaccagaaaaccctgctgatgaaactgatcaatttgccactgcgcaatcatagtttttcctcttcacgttccgatagttaagccagagaaacatctttgagaaaggcctcgacccgcgggtgctgcccgctacgcatcgcctgcggcgtgtcatcgcacaccacccggcctttctccataaacacgatccggtcggacactttgaaggcgaagttcatctcgtgggtgacgatgaccatggtgatgccttcgtgggccagggattcgataacctgcagcacttcattcactttttccggatccagcgccgaggtgggctcatcgaacagcatgatctgcggacgcatcatcagggcgcgggcgatcgccacccgctgctgctgtccgccggagagctggtgtggatacttccaggcgtgctccagcatgcccactttgtgcagcagttcgcaggcgtgctggcgcagctccgcgtcacttgccagatggtgatagcgcggggccagcagcagattgccgaacacggtcagatgcgggaacaggttaaagctctggaacaccatgccgatgttcaggcgatgttcggcattctccataaagcgcggcttctgctgcccctggcggtcgaggtgaataaagggttggccgttaatctgaatttcgccgttatcgatctgctcaagaccgttcagcaggcgaatgagggtggttttccccgagcctgacggaccgatgaccgagaccacctcgccgggctggatctgcaggctcaccgcccccagcacttcgacgttgttgtaggccttatgcagcttagaggcctgcagtgccggctcatgactctgggtgacgctgcgcgccatcgccgggcggcgggcgctggccagccgctgcatctcggcatctaccggacgagcggtattgcgctgggttacgtcaaggtagttctccagccgtttcagcagaaaatcgaacaccgtgacgataaagatgtaataaaacgccacggccgtcatcgtctccatgaccagaaagttctgcgagtagagctgctggccgaccatcaatatttcggtcagggagatcaccgacaccagcgaactgagcttcacgatggcgatatattcattggccagcgccggcagggcgacgcgcagcgcctgggggatgatcacccgccactggatcccggcgtagcgcaaccccagggcccgcgcggcttcgctctgccctcgagggatggagagcaatccgccgcggtggatctcggcgatataagccgcttcgctgagaaccatcgccagcaggccggcccagaagggatcgttcagcaccggggcgaaggagggcagcgcctgcggcatgttgtagacaaaaatcagcaggaccagcagcggcatactgcgaaataaccagatatacagccgggctggggtggataaccagccgcgcggcgactgtttggccagcgccagaataaatccgagcacaatactgcagccccaggtcagcagacttaatttaatgacggtccaggtggcccaccaaaaatcggcatcgctgagcaggcttaacatgtagttccagttaaacgtcatgggctatttcactcgtcataattatcaaaaatgaaagtggctcggctgtgccgtaatggggagccaccggtattcatcgtgcgaatacactatgctggcaggatgctttcagaggcaattagtaaatttttggcctttaagtttaaaaaaactatacagcgatattaacgatatggaatttaaagtgattgttaagatactttgcgtaaacaatttaaaaacaatgactgtaattcaataacgctattttgagcagacaggttattttgcgcgaaactggggcagacgctgccagtctggcgtgcagcgtggcgcatgatggtgcaatggtggaaataaaccacgcgggcgtagagcaataataaatattgtcgccccttgtcgggcagtgcgccgctcttttccgggggtggcacgcggattgcttgggacttagaggaaaactattccctgtgtgcgccggaccatattttatcaatggtgatgctatgaaccgatttaccctgaagcagctcaaatatttcgtcaccgtggtggagacggagagtatcgccgaggcctcccgccagctgcacattgcgcagccgtcgatttcgattgccatcaagaatctggagagcaccttcgaccagcagctgtttattcgccaccatgcgcagggcgtttcgctcacctccagcggtcggcggatctacgataaagcgaaagagctgctgcgcctgtcctgggagttcgaacagaattcgcgagcggataaagagctggtttctggcatgatctccatcggttgcttcgaatcggtggctccgctgtatatgccgaagctggtggccgggtttaagaaatgctatccggaaatcaccctgcatctgtacgacggcgaacagcatgagctgatgcatggcctgcaccgcggccgcttcgacctggcgctggtttacgatctggagctcggccattcgatcaataaagagcggctcaatgccccgcataaaccctacgcgctgctgcccgccgcgcatccgctggcgcagaaggcgcaggtgacgctgcaggagctgagccgcgagccgatgatcctcctcgatgcggtccccagtaaaaattattttatctccatctttaaggaaaagggttatcacccggaagtggcttacagttccccctccattgaaatggtgcgctgtatggtgggtcaggggttgggtttttcggtgctggtcacccggccctgctgcgatatgacctacgatggcgaaagagtggtgcagcgggatattgccgacgagatgcccgcctcgaccttaattatggcgcatctcgcgaataatgagcccacgcggccgacgcaactgtttatggattattgtcgcagcatcgaattaaccccaactcacgcctgaaataacgcctgtcgatccggcaggcgttatttttttgtcgtcactcagcctcgtaaaattctattcagtcgatcgttttataatattttaccaattcgtcacagttaaataacctgaaagccgtcaattccggcgacgtcgtcggcaactgtgcttgaaggatagcgaaatgactgaacagattaccgagatcgataccctggtggtcggcgcggggcaggcgggcgtcgccatgagcgagcatctgacccggctggatatcccccacctggtgctggagaaacagggtattgcccaggcctggcgcagcgggcgctgggattcgctggtggccaacggcccggcctggcacgatcggtttccggggatggtgttcccggactgcccgccggacagctttgtcggcaaagagcaggttgcggactattttgccgcctatgcccgcagcttcaatgcgccgatccgtaccggggtggaggtgtacagcgccgaacgcctcgccggacggccgggctttcgtatcgacacctcgcagggagtgattgaagcgcagcggatcgtagcggccaccgggccgtttcagcggccagtgatcccggccattgccccacagagtccggctattcagcagctccactccgcgcactattttaacccgcagcagctgccggagggcggtgtgctggtgattggcgcaggatcctccggcgtgcagattgccgatgagctacagcgggccggacgcgcggtgtggctgtcggtgggagcgcacgaccgcccgccgcgtcgctatcgtcagcgcgatttttgctggtggctcggggtgctggggatgtgggatgccgcggccaatgcgccgggtaaagagcatgtcactatcgcggtgagcggcgcgcgcggcggccataccgtcgattttcgccagctggcgcatcagggggtcacgttagtggggcagacccgcggctttgacggtgacaaagcactgtttcaccccgacctggcggagaatatccgccgcggcgatgcctcctaccttgcgctgctcgacgccgcggacgcgtgggtggcccgcaacggcatggacctgcccgaagagccctccgcccgcgaatttctgcccgatccggcctgcgttaccgacccgctgctcagtctcaatctggccgaggccgggatcggcaccatcatctgggcgacgggctacaccactgactatcgctggctgaaggtcaacgccttcgatgacgcacagcggccacagcatcaccgcggcgtatcgacggagccgggcgtctatttcctcggcttgccgtggctctcgcggcgcgggtccacctttatctggggcgtctggcacgatgccaaatatattgccgaccagatcgccattcagcgccagtaccagcgttaccagccgtcctgttaaccgttttccttaaggagtgctttgatgccaactcatacccgtattcgcatgtttaacaccaaagagacctacccgaaccaggcgctgaacaacgatctgtgccaggcggtgcgggccggcaataccgtctacgttcgcggccaggttggcaccgacttcgccggcaatctgattggcctcggcgacccgcgggcgcaggcggagcaggcaatgaagaatgttgaacagttgctgaaagaggcgggaagcgacctctcgcatatcgtcaagaccaccacttatctgatcgatccccgctatcgcgagccggtctatcaggaggtgggcaaatggttaaaaggtgtctttcccatctccaccggggtggtggtgtcggccctcgcgcagccgcagtggctgatggagattgacgttacggcggtgatccctgacgactggcagggggaggcagcagaatgactctctctattagcgcccgctgcccggaatcaggtcagctcggcattgccattagttcgtcgagcatggccgtgggatcgcgctgtccgtggctattgcccggcgtcggcgcggtcgccagtcagaacataaccctgccgtcgctggggccgcagatcctcagcgcgctcgaagcgggggccagcgttgagcaggccctgaacctggccctggcggaggatcgcttccgcgaatatcgccaggtcgcggcgattgacgccaacggcgacacggcggtgttcagcggggagttcaccctcgggatcggcggcgccctggcgggggataactgcgtggcggcgggtaacatgctggccggtcagggggtaatcgccgcgatggtgggcgcctttgaggccgccaccggagagctggccagccggctgctggccgggctgcgcgccgggatcgtcgccgggggcgaggccgggccggtccactcggcggcggtgaaggtggtggacgattacccgtggccggtggtcgacctgcgcattgactgggcggaggtggatccgctggcggcccttgagcagctgtggctggcctgggagccgcaaatggacgcctatattacccgggcgctcgacccgcgcgaggcgcccgcctatggcgtccccggcgatgaataacatcctcgccgcgctgctggcttttgacaccaccagccgccattcgaacctggcgatgatcaactggatcgccgattttctcgctgcccgcggcgtggcgtcccgccgcttttatgacccgtcgggcggtaaggccaatctctacgcccggctggggccgtccggcggcggtggggtgatgctctcgggccacaccgacgtggtcccggtggacggccaggcctggagcgttccgcctttcagcctgaccgagcgcgatggccgctactatggccgcggcagcgccgatatgaaggggtttctcgcctgcgtgctggcggcagtggatgactttctggcggcgccgctgcgcatgccactgcatctggccttctcctatgacgaagaggtcggctgtctcggtgtgcgcagcctggtggattttctgcaggcctcgccggagaaaccggcgctgtgcctcatcggcgagccgacagagatgcagccggtgttcggtcataaaggcaaactggccatgcgctgctgcatcgaggggcaggcctgccattcggcctatgccccgcagggggtgaacgccatccgctacgcggccaggctgatcaaccatttggatcggctgggcgtgcgtctggcccggcagcaggacagccgcttttcgccgcccttcagcacgctgcaggtgggcaccattcagggtggggccgcgctgaatattgttccgcagtcctgccgctttgattttgagatccgctacctgccggggatgcgtcccgaagcggtcaccgaggcgctggcggcctacgcccgtcgccagctgctgccggagatgcgccgggtaggcagcgggagcgacatccagttccagctgttaagccactatccgccgctgctcagcgatccgcagtccgacttcgcccgctggctggcgcagtggtgcggcagcgaccgcttctccaccgtggcgttcggcaccgaaggagggctgttcgatgagatgggcgtcgcgaccctggtctgcggaccgggcagcatggcccagggccataaggccgatgagtacatcagcatcgcgcagaccgagcgctgtatgacgatgctgcgacagctttgcgcgtggatgcgtgccgaaccggcggaaccgctcacctgatccctcaacacaggaacccaagcgatgcacaatcaacactctccccacatcgatcaagcgaccatcgaccgctggcaggcggatggcgcggtgttattaaaaggcgtctttaccccctgggtcgagcgcctcgccgaaggggtcacggcgctgatggccagccccagcgagtatggtcatgcgcgcacggtgatccccaaagatggttcgccgcctttttttcaggactactgcaactggtcgcggatcccggcgtttagcgagtttgtctttcagtcagcggccgccgagatcgcggcggcgctgatgcagtcgcagacggcgaaatttttccatgaacatacgctggtcaaaccggccggaggcagcacggtgactccctggcatcatgaccagccttactattgcgtctccggcaggcagaacgtcagcttctggatcccgctggacccggtggcggaggccacctcgctgcgttgcattcgcgggtcgcatcgctgggaggaggagttcagtcctacccgtttcaatggcactaagctttacgagcacacccggttcagcaccctgccggatatcgacgcccatgaggacgaatacgatatcgtcagctgggcgctggagccgggggatgcggtggccttccattttcgcaccgtccatggcgcccgcggcaaccccggcgcgcgggcgcgacgggtcttctccgcccgctgggtgggggatgacgcctcgtttgccgatcgcggcggcgtgacgtcgccaccgttccccgagctgaccctgcgggacggcgacccgctggattccccgctgttcccccaggtttggccgcgggcgtgagccactggaagcgggatctgctatgatcccgactttcgttgtctggagccagtcgatgttcaacgacgccattgtttatgaccgctacgggccgccggccgccgtgctgaccctgaaacgcctgccgctggcgccgctggcgggcggacgggtgcgggtcaggatgcgctttgccccggtgaatccttcggatctgatccccgtgaccggcgcctatcgccaccgcacccgactgccggccgtcgccggctatgaaggccttggcgaggtggtcgccgcgccatacggcagccggctggccgcgggccagcgggtgctgcccctgcgcgggggcggcacctggcagcggtttatcgatctggatgagacctggctggtgccggtgccgccggcagttgacgatctgctggccgcccgcgggtatatcaatccgctgacggcgatgctgatgctcaagcgctggccggttgccggaaaacacctcgtgctgaccgcggcatcgtcctcctgcgccagtctgctggggcagtgggcgctggcgatgggcgcccgctcggtgagcgggattattcgctcgccgcagcaccgggcgcgcctggaacaggccgggatctatccgatcctcgataccgaccgggcgctgatggagaaggtcagccagcacagcgatctggtgtttgacgcggtgggcggcgaactggcgaatacgctgctgtcggtgctgcccgggtcgtcgaccctgatctcctatgggctgttatccgggcggccgctgacccagacgcgcggtagcgcgacggtgcgcaagtttcatctgcgggaggcgctgccgacactcagcgtggcggcgtggcgggcagcgttcgacgaaatctggcagcgcctgccgacgacctcccagccgccggcccagcgtatagcgttgaacgactggcgggcggcgattgccgccgccggccagccgggaagaggcggtaagatcctgctggatttcaccgccggttaagattactttttcttttcgcccagagtaggggtttcgtcaaagaagttccacggcttgagcagcgcgtgcgcccactcggtcggcatgatcggccactcttcggcgcgcgccacgtgggtggtgccggtggtgatccacacgacgtcatcgtggttagtcagcgactcatcatccttcgcgtactggcccaggccggtatcgtgggcggaacggttcgggtatttcccttccggatatcgctctgtcgggtggtagcgcgtcacccacagctgtttatccataaagctcaggcgatgatatatccactcgtccggggcgaatttggcaccggtcgccgccgggtgcgtgccgccggcgtaagggataatctggtatgagaccgggttgcccatgcggttctctttgctggtgttgctcagcaggcgaatggtgccagggtcgaatttctgcgccgctttctgctcgctatcgattgtgtactgattcacctgcatggtgctggtgcgcgggccgccggcggtgtttggcttcacttcaggatccatcgccaccagggtgttgttctcgccgtccacatcgaggtcgaggcggaagttatagatgtgctggtgagtggtgccgacaatattatggtcgatcagcgttccgtagcgggtatcctctttggcgctgggatcatgcatggtcttcgccagcacgcctttcaccgcttcaatcccggtggcgccggcatcgataccgatggtgccgttgtcgtggaacacccagtcaaagatatagtcgtagttgccgacggtgctgatccagcgtaccaccagttcccggcgttcggtgctgacgttgggtttgcccatttccaggtgcttatactcaggcccggcatagcgttcgaatatggccaccgcacctggaatagtggttggtttgccggtgtaatcggcgatagtttcgtccagcagtaccgcatttgacggcgcatctttaccgcgtacaatcggcgaggtcagggtgcccatgccgtaatcgccggagtcgaggtaggctttgaaataccagccgacgtccgggtcgccgtaggggacgatcatcccgcccagggaaccttcatacatcacctggcgttttgtgccgttatcgttgtaagtcaccgttgagaggattggcccgacgcgcgagttcaggcgcagatgaaaatcccagttctgccagtgaatggtatcgccggtaatggtgtagtttttgccttccggttcggttatctccagcggtttcaccgccggggcgttgcggtcgcgaccatcataaggacggggctccattgggaccgggatcaccggaccttcttcgattttgatgattttcttcgcttcaaggtcgaccaccgccaccaggttttcaatcgggtgcgcccagtagttgccgtcgccggtatccagataactgaccaccttcagcagacgcgcatcctgctgcaggccatctttgccatcaaaaaagccaacggtgagcggggtggtgaccactttgccaggatcggtaataccgtgctttttcagcacctcagcgaattcgctgctggtattgatgatgttctgcacgctgacaaaatcatcgagcagcaccatcccgtgggcgcctttgatcggcgtccaggaaaggatttttttgttttgcagatcgaccacggcttcaatgacgtgtttgccatcgagcatcaccacatcggcagtgcggggagcatcgaccggcgttccctgcagggcaaaggcccataccgccgccttgtccggctcgtgtaaggaaatctcagtaaagcgggtattcggctgaaactccggcgcggctttgacaatggtcaccgcttcactgatttccgccgccgagagcgagtttaacgggtgcgggcgcttttccacctggaaggtctgatcgagaccggactggaagacatcgttgataaaggtatcggaaacccaggctttaccttccttcattaccacaggcaccggtaggtcaagggatttaccgttgacgatcgccgttttggctccgggctttactttgacgtaagcgccgtcttttatcagggtgaacatttgcgcgtagtcatcccactgcacatcagcgccgaattcctgcagcgttttatccagcggtaccatgtgggcttcgctaccgtgagcgaagaccggtgattgccaggcgcaaaccaccgccacggccagcgccagcgcggttttacgaggagaaaatttcaagccgtttgccattgtgacctcatcttattgttgtgttgtctcttgccgctgcgaatgtcggctttgtcatccttaagctaccagccagcggcgccggggcgtttgtttgcttttgccagcttgtttgtcagttttgccagacgggcgtaaaaaatgcctccgcagaggcattgagaatgtgcgctgatttttttgccgggtggcggctgacgccttacccggcctacggttcgtgcggcctgccgttaatttattcaccattcttgctggcccgagcccgggggtacagggggtggcggcgactggccgccccctgtgcgctcccagcgctatgccaggcataacgcagacgattaaccgggagcgcaatgtgcgctgaagccacggataacataaaggacgtcccggggcgaaaccgttgcaaaccgattgcagtatcaatggctaaagggtcggccaacagagcgccagcggtctatttttcgctatcacgccggaaatctccctgttgacgcgccaccagggtcagaatggaatacagcgccaccgcctgctggtgctggttgaaaatctccaccgcccattccaccacgccggtggctttctcatcggcgctgcgctgacgtttgaccgttttccgcttacaggtgaggcgaacctgaatggtgtcgcccggtttgaccggctcaataaagcgcaggttttccatcccgtagttggcgataaccggcccgacgccggcatcgacgaacagcccggccgcggcggagatcaggaaatagccgtggaccacccgctcgccaaaaatcgactcggcggcggcgattttgtccatgtgcgcgtagaaatgatcgccgctcaggcaggcgaagttaacgatatccgcttcggtcagggttcggcgcggggttaataagctgtcgccaggctgaatctcttcgaaatatttgcggaacgggtgaatacggtcttcgttcacctgggcgccgcgcacccactgttgaccgatggtcgccagcatcgttgggctgccctggaccgcggtacgctgcatatagtgtttcaccgaacgcagcccgccaagctcttctccgccgccagcgcggccggggccgccgtgcaccagctgcggcagcggcgaaccgtggccggttgactcgaccgaggacgcctcgttcagtatctgaatacggccatgggcgcgggcggcgccgaggataaactcgcgcgccagctcgccgctggcggtgaccagcgtccccgccagactgccgccgccggcgcgcgccagcgtcagcgcatgctggcggtcgcgatacggcatcagcgtcgccaccggaccaaaagcttcaatggcgtgaaccgccggcgtttcatccggctgtgagcagtacaacagggtcggcgggaaaaatgcgccggccgcgctgaggtccgcctctccaccgagcagtacttcgcagccagcggctatcagcttattgacgctctcctgtacgtcctgacgctgttcgctattaaccagggcccccatcttaacgccctcctgcgcagggtcaccgacggttactttatgcaggcgggagatcagtgcatcgctaaccgcattaatctgagccagtggcacaatgattctgcggatagcggtacatttttgcccggctttcgccgtcatctcgcggaccacttcccgaataaacagcgcgaattccggttgctccggagtgacgtcttcgcctaacacgcagcagttgagtgaatctgcttccatggtaaagggaatggatttggctaccaggttagggtgcgcccgtagctgctggccggtggcggctgacccggtaaaggtcaccacgtcctggctatcgaggtggtcgagcagatcacccgcgccgccgcaaatcaggctgatggcgccctccggcaccaggccgctgtcgacaatcgctttcaccattgcctgggtgagctgggcggtagcggttgccggtttaatgatcgccggcataccggcaagccacgtgggcgccagtttttccagcattccccagcaggggaagttgaaggcgttgatatggacggcgacgcctgattttgatgtcagcacatgacgcgcggcaaaaccgccctgtttggagagcgggatgagctcgtcttccggccacaggatatcgtccggtaattctcgactaccgagcccggcataggtgaaaagggtaccgataccgccttcaatatccacccaactgtcggcgcgagtggcgccggtttgcgcggagatggcgtagaactggtctttctgctccagcaggtgtttcgccaccgctttcagcatcgcgctgcgttcaataaaggtcatcgcctgcagggctttaccaccgcgctcaatcgcgaagcggcgcgcctgcgccatatccaggccttcactggtcacctcccaaagcgccgcgccggtgatggcgtgatggatagtacgggcgcggccccggccggtctgccaggcgccggataagtagctggctaactgctgcatcgcaaatctccaaatgtgttacgtgtgatatctataaatagttcttttatgaatcataaaatgcaagcccgtatttaataaattattaacattgtgatcgcgatggcgttacgccttatgcttaacttactgtattaattgtggtttacaaaaggttttgcggagattatcacaaaaagagcaaacaaaatttgtggttttatttaaccaatatgtaaccttcaataaacaaagtgattcacataaatgtttttgttgtgaatatcggaatcataaaggtgatgacgtgacagaagaacaacgctttgaccagcgcatcgcgcaggaaacggccatcgaaccgcaggactggatgccggatgcctaccgtaagaccttgattcggcagataggccagcacgcgcactcggagatcgtcggcatgctgccggaaggcaactggatcacccgcgcgccgacgctgcgccgcaaagcgatcctgttggctaaggtacaggatgaggctggacacgggctgtatctctatagcgccgcggaaacccttggctgcgcccgggaagacctgtatcagaagatgctcgacgggcagatgaaatactcctccatttttaactacccgaccctcagctgggcggatatcggcgtgatcggctggctggtcgatggcgcggccatcgtcaaccaggtggcgctgtgccggacctcctacggcccctatgcccgggcgatggtcaaaatctgcaaagaagagagctttcaccagcgtcagggttttgaagcctgcatggcgctggcgcagggcaatgaggcgcagcggcagatgctgcaggacgccattaaccgcttctggtggccggcgctgatgatgtttggccctaacgatgacaactcgccgaacagcgcccgcagcatggcgtggaaaatcaaactgcactccaacgacgagctacgtcagcgcttcgtcgacaataccgtgccgcaggtagagatcctcggtatgaccgtcccggacccggatttgcagtttgatgaagccagcggccactaccgcttcggcgaaatcgactggcaggaatttaacgaggtgattagcggccgtggcatttgcaatcacgagcggttggcagccaagcgtaaggcctgggaagagggcgaatgggtgcgcgaagccgcgctggcccatgcgcaaaaacagcaggcccgcagcgcggcatgaggagagacaacatgagcaaagtttactggccgttatatgaagtgttcgttcgcagcaaacaggggttatcccatcgtcacgtcggcagtctgcacgctgccgatgatcaaatggcgctggagaatgcccgcgatgcctacacccgccgcagcgaaggctgctcaatttgggtggtgaaggccagcgaaatcgttgcttcgcagccggaagatcgcagcgaattcttcgacccggcggaaagcaaagtctaccgtcatccgactttctataccgtgccggacggcatggaacatatgtgaggcggcgatgaataaccctaaccccgtagccacctacgccctgcggcttggcgacaatggtctggttctggcccagcgtttaggcgcctggtgcggacatgctcccgagctcgagatcgatcttgcgctggccaatatcggcctcgacctgctcggccaggcgcgcaattttttaagctatgccgccgagcttaacggttgcggcgacgaagatacgctggcttttggtcgcgatgagcgccagtacagcaacctgctgctggtggagcagccaaacggcaattttgccgacaccatcgcccgccagttctttatcgatgtctggcacgtcgccctgtacagccggctggtgaacagccgcgacgcgcagctggcggccattgccgccaaagggctgaaagaggtgcgttaccacctgcgcttcagccgcggctggctggagcgtctgggtaacggcaccgagttatcaaatcgcaaaatgcagcaggcggtcgacaatctgtggcgcttcaccggcgaactgttccttgccgatgaagtggagctcagcctggttgagcagggtattgcggttgatccgcgtgagcttcaggccgaatggcaaagcgcggtacacacggcgctgctcgactccggcttacaaatcccgcaggaagcggccttccgcagcggcggcaaacaggggctgcacagtgaacatctcggcccgctgctggcggagatgcagtatctgcagcgttcgcatcccggactgcagtggtaagtgaggtgactatgcaacgtcttgccgatatcgctcctgcagaggttcgcaccatctggggattattaagcgcgatcccggatccggaagtgccagtactcaccatcaccgaccttggtatggtgcgcagcgtcgcgcgccatggcgacggctgggtgattggctttaccccgacctattcgggctgtccggcgacggagcatctgctgggggagatccgcacggtcatgaacgagcatggctttcagccggtacatatcgtcctgcagctggatccgccgtggaccaccgactggatgagtcaggatgcccgcgagcgcctgcgccagtacggcatcagcccgccccaggggcacgcctgccatgcggatatgcccgctgaggtgagctgtccgcgctgcggcagcacccatacctcgctgattagcgaattcggttccacggcctgcaaagcgctctatcgctgcgacagctgccgggaaccttttgattactttaaatgtatttgaggttgccatgacgacgttctattcgcttaaggtggcgagagtcgagccggaaacccgcgatgcggtgaccatcacttttgcgatcccgcaagccctgcaggcggaatactgttttcgcccgggccagcatctgacgctaaaagcccgtctgggcggcgaagaactgcgccgctgttactccatttgtcgcagccgcacgcccggcgaaattagcgtcgcggtcaaagctatcgacggcgggcgcttctcgcgctacgcccagcaggatatccagcagggtatggagctggaggtgatggtgccgcaggggcatttcggttatcaaccgcaggccgaacggcagggagaatatctggcgattgccgccggctccgggatcacgccgatgatggcgatcattagcgcgacgctagcgaccgagccgcaaagccgctttacgctgatctacggcaaccgtagcagccatagcatgatgttccgccaggcgctggccgatttaaaagaccgctatccgcagcgcctgcaggtgatccacctgtttagccaggagtcgatggacagcgatctgctacaggggcgcattgacggcgacaaactgcgccagctcgctgaccatctgctggatttcagccgtttcgacgaggcctttatctgcggtccggcggcgatgatggacgaggcggaagcgacgttacgtgaacttggcgtagcggagaaatcgattcatctcgaacgctttaataccccaggcggcaatgtgaagcgggtcgctggagtgcaggcggaagggcgcacggtgaccatccgccaggacgggcgcgatcggcttatcgccctcagcgccgaagacgacagcatcctggatgccgcattgcgtcagggcgccgatctgccgttcgcctgtaagggcggggtatgcgccacctgtaaatgtaaagtgctgcgcggtgaagtggcgatggccgccaattacagcctggaagcggatgagctggcggcgggctacgtgctgagctgccagtcgctgccgaccagcggcgatgtggtggtcgactttgacgcgcgggggatggcatgagtgacctgctgatccaccgtcatggccgggtgcttcagttgacgctgaaccgcccgcaggcccgcaacgcgctgaacaatgccttattaacccagattgccgaggcgctggaggccgcggcagttgatgacagcgtcggcgtctgcgttattcgcggtaacgcgcgttttttcgccgccggggctgaccttaatgaaatggcggaaaaagatctgcctgccaccctggatgatattcgcccacggttatgggggcgaattgatgcctttactaaaccgctcatcgcctcggtcaacggctacgccctcggcgccggctgcgagctggccctgctgtgcgacctgattgtcgccggggacaacgcccgctttggcctgccggaaattaccctcggcataatgccgggcgcgggcggcacccagcggctgatccgcagcgttggcaaggcgctggccagccggatggtgctgagcggcgagagtattgacgcccgccaggcgcagcaggccgggctggtcagtgatatccatccggcggcgttaaccgatgagtatgccctgaaactggcaaccaccattgcccgccattcgccgctggcgctacgggcggcaaaacagtcgctgcgcctgtcgcaggaagtcagcctgcaggctggtctgcaacaggagcgccagctgtttagcctgctgagcgccaccgaggaccgccgcgaaggcatcgacgccttcttacaaaaacgtaccccggaatttaaaggacgctaatcgtggaagctttcattctcagcgcagtggaacagggcgtcatgaccattaccctcaatcgcccggaccgcctcaacagttttaacgacctgatgcatcaccagctggcggaatgtctgaagcaggccgagcgcgatgatggcgtgcgctgcctgctgatcaccggcgccggtcgcggcttttgcgccggccaggatttgaacgaccgcaatgtcgaccccagcggcccgccgccggatctcggcatgtcggtagaacgcttttacaacccgctggtacgccgtctggcggcgctgccgaaaccggtcatctgcgcggttaacggcgtggccgccggcgcgggcgctaccctggcgctgggttgcgatatcgtgctggccgcgcgttcggccaaatttgtgatggcgttcagcaagctcggcctggtgccggactgcggcggcagctggttcctgccgcgggtggccggccgcgctcgcgcgatggggctggcgctgctgggcgacagcctcagcgcagaacaggccacgcagtgggggattatctggcaactggtggacgattcagaactggcggataccagtctgcaactggcgcgccatctggcggcgcaaccgacgtttggtcttgggctgattaaaaaggcgctgctggcctctgaaaccaacagtctcgacgcgcagctggacctggagcgcgattatcagcgtctggccgggcgcagcgatgattaccgcgaaggggtcagcgcgtttctggccaaacggccaccacagttcagcgggaaatagatgatgacgacatccttagccaccgtggcggtgatcggcagcggcaccatgggggccggcatcgccgaagtggctgccgccgccggacatccggtgcgtattttcgatattaatcaaaccgcgattgcccaggcgatcgacggcattgctatgcgtctggcgtcacgggtcgagcgcggcaaactggcgtcagagcaggccgacgcgctgctggcgcgcctgcatccggctcacgatttagccgcgcttgccgacgcggatttagtaattgaagcggcctctgaacggttggaggtgaaaacggcgctgttcgcgcagctggcggcgatctgcgcgccgtcaacgctgttgaccagtaacacctcgtctatttcgattaccgctatcgccgccggggtcaaaaacccggagcgggtggccggactgcacttttttaatccggcgccggtgatgaagctggtcgaggtggtgagtggtcttgcgacctccacagaagtggtggagcagctgtgccagtgcgtaagcggctgggggaaacagccggtacgctgccgctcaacgccgggatttatcgttaaccgcgtagcgcgtccgttctacgctgaggcctggcgcgcgctggaagaacaggttgccgccccggaggttatcgatgccgctttgcgtgacggcggcggttttccgatgggaccgttggcgctgactgacctgattggccaggacgtcaacttcgccgtgacctgttcggtgtttaacgccttctggcaggaccgccgctacctgccatcgctcctccagcaagagctggcgctggccgggaggctgggtaaaaagagcggtcacggcgtctatcgctggcccgcggagacgcagccggacgcggcgctgccgccggtaatgatgggtgctgaatccgttaccgtcagaagtgacaacgtcactgaattagacgatgtcttgctgctggagactgaaggcgagaccgccctggcgctgagtattaagcatcaccgcccggtggtggtgtatgacctgtgcgccagcgatacggtggtgctggccgcagcggcaaccaacgtgcctgcggccactgaaaaggccgtgcattacttccagcagcagggcaagaaagtgctgcgtattgccgattatcccggcctgctggtgtggcgcacggtggcgatgctgattaacgaagcgctggatgcggtgcaaaaaggcgtcgccagcccgcaggatgtcgataccgcgatgcgccttggcgtgaactatccgcatggcccgctggcatggggagaacgccttggctggcggcgggtgctgcaactgctggagaacctgcaacaccattatggcgaggagcgctatcgccccagttccctgctgcgccagaaggcgctgatggagaagcaccatgagcaatgatccgtggcgcaacgcgcgcgtgatgtacgaaaaagatacctgcgccagaaagatggggatcgaacttatcgaaatggacgacggttttgcgcagatgagtatgaccgtctcggcggacatgcttaacggccatcaaacctgtcacggtggtcagctatttacgcttgccgataccgctttcgcctacgcctgtaacagccaggggctggcggcggtggcctcggcggcaagcattgattttcttcgtccggcgtttgccggcgaccggctggtcgccaccgccagagtcaaacagcagggcaagctgaccggcgtctacgacatcgaaattgttaatcaacagcaaaagattgtggccctgttccgcggcaaatcgcaccgcatcggcggcacaatcacgggagacgtgtaatgcgcgacgcctttatttgtgacgggatccgtacgccgattggccgctacggcggcgcgctggccagtgtgcgcgccgacgacctggcggcgatcccgctgcgtgagctcctgagtcgtaatcccgggctcgacccggcagcaattgatgatgtgattttcggctgtgcgaatcaggccggggaagataaccgcaacgtggcgcacatggcgacgttgttggccggttacccgcataccgtgccgggcaccacgattaaccgcctgtgcggatcgggtctggatgccatcggctttgccgccagggcgatcaaagccggcgatgccgatctgctgattgctggcggcgtggaatcgatgtcgcgtgcgcctttcgtgatgggaaaagccagcgcgccgtaccagcgtcaggcggaactctttgataccacgattggctggcgttttgtgaacccgctcatggcgcaacacttcggaactgacagcatgccggaaacggccgagaatgtagctgaattgttaaatatcagccgggccgatcaggacgctttcgcctggcgcagccagcagcgcacggcgcaggcccagcgcgacggcattctggcgcaggagattgtgccggtgcagattgtcggccggaaaggggcggttagcgacgtgcgcgaggacgagcatccgcgcccggaaaccacgcttgagcagctggcgaaactgaaagcgccgttccgccagggcggcgtcattactgcgggcaatgcttccggcgtcaacgatggcgccgcggcgctgatcgtcgccagcgaacagcaggccgctatccaggggctcacgccgcgggcgcgtatcgtggcgatggcgacggcgggtgtcgaaccgcgcctgatgggactggggccggtaccggcggtgcgtaaagtgctggagcgagcgggactcaatattaacgatatggatctgattgagctgaatgaggccttcgccgcccaggcgctgggggtgctcagacagctcggcgtgccggacgatgcggcgcacgtgaatcccaacggcggcgccatcgcgttaggccatccgctgggcatgagcggcgcgcggttagcgctgagcgccagccttgagctgcaacgccggggcgggcgctatgcgctgtgtacgatgtgtattggcgtgggtcagggcattgccatgatcctcgagcgagtgtgagctaatttacctgcgagtaccctacaatgataactactacaaaattagatccgattgaaaccgcatcgcgtgacgaactgcaggccctgcaaacccagcgcctgaaatggacgctgaagcatgcgtacgaaaatgtgccgatgtatcgccgcaagttcgacgccgccggcgtgcaccctgacgactttcgggaattaaacgatctgcaaaaattcccctgtaccaccaaacaggatctgcgcgacaactatcccttcgataccttcgcggtgccgatggagcaggtggtgcgcattcacgcctcttccggcaccaccggcaaaccgacggtggtgggatatacgcaaaacgatattgataactgggccaatattgtcgcccgttcgctgcgcgcggccggtggttcagcaaaagataaaattcacgtcgcctacggctatggcctgtttaccggcggccttggcgcgcactacggcgcggaacgtttgggcgcgacggtgatcccgatgtccggcggacagaccgaaaaacaggcgcagctgatccgcgatttccagccggatatgatcatggtgacgccgtcctactgtctgaatctgattgaagagctggagcgccagatgggcggcgatgcccgcggctgttcattgcgggtcggcgtctttggcgctgagccgtggacgctggcgatgcgcgcggaaatcgagcgccggctggggatcaccgccctggatatttacggtttgtcggaagtcatgggaccgggcgtagcgatggagtgtctggaaaccgttgacggcccgactatctgggaagaccacttcttcccggaaatcgtcaacccggacgacggtacgccgctggaagatggcgagcatggtgagctgctgtttaccaccctgaccaaagaagcgctgccggtgatccgctatcgtacccgcgatctgacgcgcctgctgccgggaaccgcgcggaccatgcgccgcatggatcgcatcagcggacgcagcgacgatatgctgattatccgcggggttaacgtcttcccctcgcagctggaagaggagatcctcaagtttgaacatctggcgccgcactaccagttagaggtcaatcgccgcggtcatctggattcgctggcggtgcgcgttgagctgaaagagagcggtctggcgctgagtcatgaacaacgctgccagatttgccatcagttgcgtcaccgcattaagtcgatggtcgggatctccaccgatattactatcgtcaactgcggcagcattccgcgctcggaagggaaagcctgtcgggtattcgacctgcgaaaagcggtggttagcggttaatcctctctccggctgcgtggctgcgcggcaggcacccggctgaagcgtttgcgccgtcagccggggagtttcctgtgctatgattcataaaggaaaaatataacaacagaatgaatcagatgagtaaactcgacgcctttattcaacaagcggtgacggcgatgccgatcagcggcacgtcattaattgcctcgctgtatggcgacgctttattacaacgcggtggggaagtgtggctgggcagcgtcgcggcgctgctggaaggattaggcttcggcgagcgcttcgtacgcaccgcgctgtttcgcctcaataaagaagagtggcttgatgttgtccgcatcggccggcgcagcttctatcgtctgagtgataaagggctgcgcctgacccggcgcgcggagcataaaatttatcgcgccagtgccccggaatgggacggtacctggctgctgctgctttcggaaggcctggagaaaaatgtgctcgccgacgttaaaaagcagctgctgtggcaggggtttggcgcgctggcgccgagcctgctggcctcgccgtcgcaaaagctggccgatgtccagtctctgctccacgaagcgggcgtcgccgaaaacgtcatctgttttgaagcccattcgccgctggcgctctcaagggcggcgctgcgcgaccgcgtagaggagtgctggcatctcaccgaacaaaatgagatgtacgaggcgtttatcgcattgttccgaccattactgccgctgctgcgcgacagcgagccgtcagagttgacgccggagcgctgtttccagatccaactgctccttatccatttctatcgccgggtggtgctcaaagacccgctgctgccggaagagctcctgccggcgcattgggcagggcaaaccgcccgccagctgtgtatcaatatttatcaacgcgtgagtcccggtgcgctggcgtttgtcagcgagaaaggtgagagctcggtgggcgagctcccggcgccgggtccgctctattatcagcgctttggcggtttgccgggcgcataaggaggctgcatgccgatatatcagattgatggactgacgccggtggtgccggaggagagttacgttcacccgaccgcggtgttgattggcgacgtgatcctcggcaaaggggtctatgttgggcccaacgccagcctgcgcggcgacttcgggcgcatcgtggtcaaagacggcgccaatattcaggataactgcgtgatgcatggcttccccggccaggatacggtggtggaagaggagggccatatcggccacggcgctattctgcacggctgcgtgattggccgcaacgcgctggtgggcatgagcgcggtgattatcgacggggcggtcattggcgaaaacagcattgtcggcgcttcggcctttgtcaaagccaacgccgagatgcccgccaaccatctgattatcggcagcccggcaaaagcgattcgcaccctgagcgaacaggagctggcgtggaaaaaacaaggtacccgtgaataccaggcgctggtggaacgctgtaagcagacgctgcaccaggtggagccattacgggaagtcgaagcagggcgtaagcggctggcgtttgatgaaaacctgcggccaaaagccgcaacctgaggggtaaaattatggcagagaaattatccgctcactgtcactgcggtgcggtggcgtttaccgtggaactcagcgacggcttcaacaccgttcggcgctgtaactgctcatattgtcgcatgcgtggggcggtcgcggtctcttcgccgcgttcaggaatagaggtggtacgcggaggggataagctcacagagtatcgctttaatacaggggaagccgtgcactttttctgctcggtatgcgggatctacacctttcatcaacggcgatcaaacccacagcagtatggggtgaatgtggcctgcattgacggcgtttcgcctttcgatttcccttgcgtggaggtcaacgacggcgtgaatcatccaaaggatggcggcggaggcgtggtggggtatttacgctacgagaaaaagtaaaactctcctcccgcaggaagcgagaggagtgaaatattaggctgcaaccacgctgtcgatggccgctttcgcgtcagactgcgctttggccgcgacttccgggccgtaagcgataccttcggcgaacacaaagttcacgtcggtgatgccgatgaagccgaggaaggtggacaggtatggggtgaccaggtcggtcggagtatctttatggataccgccgcggctggtaacgacgaccgcgcgtttaccggttaccagaccttccggccctttctcggtgtagcggaaggtgacgccggcgcgagccaccaggtcgaaatagtttttcaactgcgtcgggatgttgaagttgtacatcggcgcagcgataacaatcacatcgttgcctttcagttcggcgatcagctcgtcggaaagggccagcgcttcctgctgacgcggagtcagcggcgcgtcgctcggacgcagggcgccaaccagttcgccatccagaaccgggatcggattggcggccaggtcacgcacggtgatctcatcgccagggtgtttttcctgccattgttcaacaaaatagtcggaaagctgaccagattgtgagtaccctgccagaatactggatttcagaactaatactttgctcatgggtgtttcctttttttaatgtgattgacgggtcaatgccctggtgcttgttgacactgtattcacaatcgcgccacagagatagcgcaatatatcgaatcctatgttcagattttttgaacaaggcgcgaatgacacagatgtggtactctaaggcaatacttcaaaagagattttcccggcagagctctgcccgataacgctatgacagaacaacaaaaaatcaccttcccccagctttatcaacagctcgacggcctgatgctgcgcgacaaaacgcgctttgcccgccgtctgcacggcgtgaagaaggttaaaaatcctgaatcgcaacaggccattctgcaggagatggcgctggagataagccaggcagccggtaaagtcctgctgcgcgaagcggcgcgtccggccatcacctatccggaaaacctgccggttagccagaaaaaacaagagattctcgaggcggtgcgcgaccaccaggtggtgatcgtcgccggggagaccggttcgggtaaaaccacccagttgcccaaaatctgcatggagctggggcgcgggctgaaaggactcatcggccatacccagccgcgtcgcctggcggcgcggaccgtcgccaatcgtattgccgaagagctgcagagcgagccgggcggctgcatcggctataaagtccgcttcagcgaccacgtcagcgaaaacaccatggttaagctgatgaccgacggtatcctgctggcggagatccagcaggatcgtctgttgatgcagtacgacaccatcattatcgatgaggcgcacgagcgcagcctgaatattgactttctgctcggctatctgaaagagctcctgccgcgccgcccggacctgaaaatcatcattacctcggcgaccatcgacccggaacgtttctcaaagcatttcaataatgcgccgattatcgaagtctccgggcggacttacccggtggaagtgcgctatcggccgatagtggaagaggcggacgataccgagcgcgatcagttacaggcgatctttgatgcggttgacgaactggggcgcgaagggcccggcgatattctgatctttatgagcggtgagcgggaaattcgcgataccgccgatgcgctgaataagctggatctgcgccataccgaagtgctgccgctgtacgcccgcctgtccaacagcgagcagaaccgcgtcttccagccgcacagcggacgacgcatcgtgctggcgaccaacgtggcggaaacctcgctcaccgtgccgggcattaagtacgttatcgatcccggtactgcgcgtatcagccgttacagctaccgcaccaaggtgcagcgcctgccgatcgagccggtttcccaggcgtccgccaaccagcgtaagggccgctgcggccgcgtttcggaagggatctgtattcgtctttattcagaagacgatttcctgtcgcgcccggaatttaccgacccggagattctgcgcaccaacctggcgtcggtcatcctgcagatgaccgccctgggcttaggcgatatcgccgccttcccgtttgtcgaagcgccggataagcgcaatatccaggacggcgtacgcctgctggaagagctgggcgccatcaccaccgatgcgcaggcaacggcttataagctaaccccgctgggccgccagctcagccagctaccggtggatccgcgtctggcgcggatggtgctggaggcgcagaagcacggctgcgtgcgggaagcgatgatcatcacctccgcgctgtcgatccaggacccgcgcgagcggccgatggacaaacagcaggcctctgacgaaaaacaccgccgcttccacgataaagagtccgattttctcgccttcgtcaatctgtggaactacctcggcgagcagcagaaggcgctgtcgtcgaatcagttccgccgccagtgccgggtcgattttcttaactatctgcgcgtgcgcgagtggcaggacatctacacccagctgcgccaggtggtgaaagagctcggcctgccgatcaacagtgagccggcggaatatcgcgagatccatactgcgctgctgaccggtctgctgtcgcacatcggcatgaaggatgccgataagcaggagtttaccggcgcgcgcaacgcccgcttctctattttcccgggttccggcctgtttaaaaagccgccgaagtggacgatggtggccgagctggtcgagaccagccgcctgtggggccgcatcgccgcgcgcattgagccggagtgggtggagccggtagcgcagcacctgatcaagcgctcatacagtgagccgcactgggagcggtcgcagggcgcggtaatggcgacggaaaaggtcaccgtctacggcctgccgatcgtcgccgcgcgtaaggtcaactacagccagatcgacccggcgctgtgccgcgaactgtttatccgccatgcgctggtggagggcgactggcagacgcgtcacgccttcttccgcgaaaacctgaagctgcgggcggaaatcgaagagctggagcataagtcgcgccgccgcgacatcctggtggatgacgagacgctgttcgagttctacgaccagcgcataagccacgacgtcatctccgcccgccacttcgatagctggtggaagcgggccagccgtgaaaccccggatctgctcaattttgaaaagagcatgctgattaaagagggggcggagcaggtcagtaaactggactacccgaacttctggcatcagggcaacctcaagctgcggcttagctaccagtttgaacctggcgctgacgccgacggcgtgacggtgcatattccgctgccgctgctgaaccaggtagaggaagccgggtttgaatggcagatccctggcctgcgtcgcgagctcattatcgcgctgataaaatcgctgccgaagccggtacggcgcaatttcgtcccggctcccaactatgcggaagcgtttcttggccgggcggcgccgctcgagctgccgctgctcgattcgctggagcgcgagctgcgtaagatgaccggcgtgaccatcgaccgcgaagcctggcagtgggatcaggtgcccgatcacctgaaaatcaccttccgggtggtggatgataaaaacaagaagctgcaggaagggcgctcgctgcaggcgttgaaagacgccctgaagggcaaagtgcaggagacgctgtcggcggtcgctgatgacggtattgagcagagcgggctgcatatctggagctttggcgccctggcggaaagttacgaacagaagcgcggtaactataaggtgaaagcctggccggcgctggtggacgagcgcgacagtgtggccatcaagctgtttgataatccacaggaacagcagcaggccatgtggcgcggtctgcgtcgcctgctgctgctcaacatcccgtcgccgattaagtatctgcacgagaaactaccgaataaagccaagcttgggctctactttaacccgtacggcaaagtgctggatctgattgacgattgcatctcctgcggcgttgataagcttattgacgaagcgggcggtccggtgtggacggaagagggctttagtcagctgcacgataaagtgcgagccgagctcaacgacacggtggtggagatcgctaaacaggtcgagcagatcctcaccgcggtgttcaatatcaacaaacggctgaaaggccgggtggatatgaccatggcgctggggctgtcggatatcaaagcgcagatggcgggtctggtgtatcgcggctttgtcaccggcaacggtttccgccgtcttggcgatacgctgcgctatctgcaggcgattgaaaagcgtctggagaagatggctatcgatccgcaccgcgatcgggcgcagatgcttaaggtggagagcgtgcagcaggcgtggcagcagtggctgaataagctaccgccgaaccgccgtgaggacgacgatgtccgggagatccgctggatgatcgaggagctgcgggtcagcttcttcgcccagcagctgggcaccccgtatcctatctcggacaagcgagtgttgcaggcgatggagcaaattaccccatagcctggctggttgtccccggtggcgctgcgcttaccggggctactggtcaggcgtccacgcttaagcgtttacccacgccagagtaaagccgtcccagcctttagtgcccacggtttgcagcgccgttgccgtcaaccttggctcggcgcccatcatctcaatgaactgacgcacaccctgaacgcgctcgtcggcgctctgtgggttgaccacttcgccgtcgcgtaccacgttatcgccaataattaaggttcctgggcgggaataacgtagcgcccagcgcagataatgggggttattcggcttatcggcatcgatgaagatcagatcgaaagcgggacattcgccaagcgactccagggactgtagcgcgggtccctcccgtagcgtgacccgctggtcaacgcccgccagctgcagattctcccgcgccacctgggcatgatgcgcgtcggcctccagggtgaggagttggccgtcggcaggaagctcgcgcgccatccagatggtgctatagccgccgagggtgccgatctccagtatccgcttagcctgggttagccgtaccagcagggcgagaaactgaccctgattggcggcgacatcgtgtgccgggagcccggcacgatggttgttttccagtacccgatcgagcacaggatcgccgggaattaaggccttaatcaaataattgtctactgccgaccactgttgttgcatatgacgcttccccatttagctccctgatgagtcagaccagccgcctcccagcgcccggtacagatcgatctgcgccagcagcaggttgttcttcacctgcaccacgctaagctgggtggagaacagcgttcgctgggcatcaagcacatccagataagaagagtagccgttacggtagcggttttgtgcaatacgtaaggtttcctgggcaacggtctcttgttcctgaagctcggttaactgttcgccatagcgactgatggcgtccaggctgtcattgacctctttgaacgcgctgcgcaccgttttctcatagctatagagcgcctggttgcgctgggccatggagacgtccacctgggcatttaacgcctggcggtttagcagcggcgccagaatactgccgccaagactccacagccgcagcgggttgtccagcagatccggcagcgtccggtcctgcaggctgccggtagcggtcaggttaatagagggcagcagctgcgcctgcgacgaggccagcgtggcgtcggcagccaccagctggcgctcggcctgagcgatgtccggacggcggttgagcaaggtggacggcagctgcgacggcagacgcagcggggtaagctgggcgaattcgccgcgttttaccgcgccagggttatcgccgagcagcacgctgagcgcattttcctgctgcgcaatctggtgctgtagcggcgggatctgcgcccgcgttgaccgcagctccgaatccgcctgcatcagctcaaggcgtgaagtatacccggtttcaaactgacgtttggccaggcgccacgcgtcttcccttgatgttagcgtctgctgggtcacccgcagctgctcatccagcgacagcagcgtgacgtagccaacggccaccgagctggcgacgctcaaattggcggcggcggcggcggctttctgcgcctcaaggctggccccggcggcgttggccgcgctgcggttcgctccccagatatcgacatcatagctggcggtcaggccgcccttatacagtgtgctgtggatcggcaggccggtggcggcggactgcgtccgggcgcgggtgccggtgaggctggcgtccagtgacggaaacaggctgctgtcggcggcgtaagcgcgcgcctgatactcattcacccgctcgcgggcgatcagcacatcgctgttatagcgcagcgcctggtcgacatactgattgagggtactgtcatgaaaattgcgccaccatacaccctccaccgggctggccgggccaacgtcggcccgccaggcggcaggaatggtcagggtcggctgcgcgcgttgcacatcggcggattgacagccgaccagcgccagaacgatagcaagggcgaccgggcggatcatggttgtttctccgcacgggtatcaatagtcacctgcaccgacatccccggccgcaggcgttcgctgttgttttgcccgtcgttgaccgtaatacgcaccgggatgcgctgggcgatcttgacgaaattgccggtggcgttgtccggagagatggcgctgaactccaccccggtcgccggggagatactctgcaccttgccgtggaaggtctcgccgttgagcgcgtctacggtgaaggtgaccggctggccaacgcgtacttcggccaactgggtctctttgaggttggcaatcacccagtgctgcgacggaaccagcgaggtcagatgggttccggcgctgacataggcgccaagacgcaccgagatctgccccagctggccgccggtgggggcgataatctgggtattctgcaggtcgatctgcgccagctcaagcgccgctttggcgctggccacgtcggcctccagcgaatcgcgattgacgatggtcgattcacggtcctggcgcgacatctccagcgccgctttcgcctgctcaatatccgccgccccttgcgccgcgctggcccgcgccgaatcacgttcgcggatcgacagcgaaccgtcggcggttaactgctggatgcgttttaaatcggcctggattttcagattctgcgcgcgggcgttttgcagcgcggcttcattcttggcgatcgtcgcctcggcgcttttgcgctgttgcaggttattgcgcagcgcggcctctttcatcgccagggtagcctgggcctgatgcacccgctgtttatagatgcgatcgtctatctggaacagcacctcgcccggctggacaatcgcgaaatctttgacgttgacggcggtgatatagccgttgacctgcgggctaataaaggtggtctgcccgcgcacataggcgttgtcggtaaactggctatggcgagtgaacggcggcagttgccaggcgtagaggatcaccagcacgccgacgaggcctatcgccgcggcggtaaaaatggaaaccacgcgaatattattccgggtgttggcctgttgtttggccgcatcctgctgactcataacgactccagagatgaaatgatgataattatttgctgccggtagcgcgttgcaacgcgatacgggcagtcagtcgtaagcgaattaagcgccagaaaacccacactagtgtcccggcggagatcgccgccgtcagcagataggtatcattccaggcgagaatattggcctgcagcgtcgcggcgttttgcagcagggtggtggcctgaacgttgagcagcgtactgtcgccaatctggctctgatacatctggctgtactgctgcagccgctcgacgatcagcgggttaagggtggttatctggtccgccagctggctggagtggaatttctcacgccaggtctggaaggtgccgaggatcgccgagccgagcagcccgccaatgttctggctcatgccgaacagcaccgagaagctgaccaggttgcgcgggtcggcaaacacgccgccaatcccggcgagcatcgccggggccagaaagaaggcgctgccgaagccgagtaaaaactggctgaacattaattgttccggacgggtgagggcgttggactggctgtcgagcagcgaggctatcatgatcagcgccagcgcggtggcggtcggccagtagagcttctgcgggttgagcgtcagacagctggcaatgatcccgcacagaataccggcgaaaatcgaccacgcgaggttagtcatctgttcgttttgcaggccaacgtactgcagccagccgatgaccccggtgttctgctccgccaacacgatgcggatcaacagcataatcaggcccagacgcacgatgctgccgctggagagccatttggtattgagcagggggttgctgcggttatgctcgaaggtaatcgcagcgacgatcagtattaccgccgccgccagcgcccagccgatccacggcgcttcaaaccaccactcgagccgccccagcgacagcacggcgcacaccagcgccatgccgggcgccagcagaaagaaggtaatgaaatcctttttttcgaacacttttttacgatcgcttggcggcagttttagcgcgatgacgcaggccagcgacaccagcgccaggcccagttcaaagaagtagagaccgcgccattcatcggtctgcagcagttcggtggaaaagaggcgcgccaggggaatggctagcgacgagccggtgatgccgatagttagccctttcaggcgatggcgcgcaggccaggcctgtacctggtagtaaatccccagcgagctgagcgccgcggccaccatgccgtgggcggcgcgaaccatcatcgctgagctgagatcgttgacgaagaggtggaaaaaggtgaccagcacatagagcaccaaaaagccttcggtgaaagcgcgcaggccaaactgctggcggaatttcaccagcagcaggttgatggagacgttggtcatcacgtataccgccggcagccaggcgatttctgtcgaccaggcggcgaaggtaccctgcagcagctgcaggttggcggtgaccactgcgttgcccagcgcgccggtgagacacaccagcagaccgaccacgccgtaggcgaggcgtttcgccggactgtgcagcggcgtcgacggcgaaccgagcagagccggtttttcatgcggcgcccagtcatgcggggcgtaggggttatcctggcgacggggcattatttcttctccacttcgcgcaacagcttttccagcacccgctgggtttgctcctgctcctgtggggtaatcgccgtcaggatctcttcgcgcagatcgtcagccaccgttttgacctgttcatagagggccttccctttgtcggtgaccaccagcagtcgcttacgtttgtcgctggcggtggtgatgcgctccaccagtccgagggcgaccagacgatggatcaacggcacaatggtcgggctctccacccccagctcctgcgccagttcgctttgcgacagcggctgctggtggcgggcgatggacgctaccgccacccagctggcctggctgagaccgagatttttcagccgacgattgaccgccagccgccagtggtgcgcggtgaggtataaaagatgggagaaggtaagctgtcgattgtccataggtcgtctgtcaatatcgttagagctctaacgattttatgccggataaccgccggagttcaagatgaaagatagaaattggttaacggtatgtacgttaattgtagttaatcttccggccgcgatccgtgtcgtgcggtctgctgaccgaggatatttttattctgcgccatcacccaggcgataaaggcccgcaggggggcgggaatatgtttccggcttgggtagtagacgcagaaatggtcggcaggatagcggtagtcgggtaacaaatggaccaggctgcccgcgctcagctgctgcgtcaccagcgactgatagacaaaggcgatgcctaatccgctctccgcggcctggatcattgcgctatcggcatcgacgaccagatcgcctttaaccgcgacctcgctaagctcgccgctggggccaataaactcccagcggtacttctcaccaccaggaaaacagcggttaatgcagcggaaattaactaatgactgcggggtgtcgggctctccggcttcgcgtatatagtccgggctggccaccgggatcagcgatagtttctcgccaaaggggatggcaatcatctctttgggcacatcctgcgaatagcgaatgccggcgtcaaaaccggactcgataatattgactttccgatcggtggcatacagttcgagcgtcacattgggacaggcgtttttaaaggcgataaaatagtcttgaaaaaacaggtcaataacaatgcgcggtaaattaactttcaccacgccttccggagtcagacggtgataattcagactgtccaccacccggcgataatcattgaccaccggcgttatattattaagaaattcctcacccactgcggttaatgacaaactgcgcgttgagcgatttagcaggcgcacgcctaacttttcttccagatgattaatagcgacggtaagggccggtggggaaaggtttaacgctttagcggcctgacgaaaactgccatgtttcactatgagtattaatatttctatttgttgcagatcgggcaaggttttcattgttaatttccagctaacaccgcgttcggaatagattaattgttatcaatatgaaagggaagtatatatttaatgccattcagcaattaaggaaaataagatgaaaacacgttatcttggaaaagagaagtttcaggtttccgcattaggtctcggatgtatggggatgagttttgcctatggcggcgctgaaacgtcgcaggcgataaatacgatccatgccgccatggacatgggcgtgaccttcctggataccgccgaagtatatggtcctttcgataatgaagttctggtcggaaaagcgattaaaggttttcgcgataaggtgcagattgccaccaaatttggatttcgtattttgccgaccggccagggtctggagcggatggccggcgttgacagccgtccggcacatattcgcgaatcagtggaagggtcgctgaagcgactgaatgtcgagaccatcgatctgctctatcagcaccgcgtcgatcccgcggtaccggtggaagaggtggtgggcactatggccgatctggttaaagagggtaaaattcgccatatcggtctgtcggaagtatctgctcagacgctgcgccgggcctgcaaggtacatccgatcgctgccgtgcagacggaatattcgctatggagccgcgagccggaggccggtattctccactcctgccgcgagctgggggtcggctttgtgccatacagcccgcttggccgcggcttcctgacggggacaattaccgatcccggcgttttggcagcggatgatttccgccgccatctgccgcgcttccaggccgaaaccatgcgcaaaaaccagctgctgcttgagcgcctgcagcaggtggccacccgctatgacgcgacccttgcgcagattgcccttgcctgggtgatgagcaaaggcgaggatatcgtgcctatcccgggggcgaggaaaattgctcacctgcgcgacaatgccggcgccgcgaatattactctcgcgccggaggacatcctcaccatcgaacatattttcactgccgacaacgtcactggcttacgctatacccagggcgactttgatttaatcgaaaaataatcccctacgggcagcggatggttattacttgcgtgacgttgtcacctttgcttaacaactcctcgtcagatagcgcacatcctcggcggttaacggcgcggcaaagaaaaaaaggggcggcgcaaggccgcccctgatgcggttgctgatggggatcagcccgggtagatgccgcggtctttacgcgccatcaggatgcgctcgcaggccacgatataggcggcggtgcgcagcgtacactctttctcggcggctttatcccagacgtgcacgatagcgtcggtcataatgcggtccatcttggcgttgatctcctcttcgctccagaagaagctggccatgtcctgtacccactcaaagtagctgacggtcaccccgccggcgttgcagataacgtccggcaccacgatcacgccgcgctcggccagcacgtcgtccgcttccggataggttgggccgttggccccttccagcaccagtttgcaggtcagcttctcagcgcgctcgcgggtgatttgcccttccagcgccgccgggatcaggatgtccatcggagtggtccagaaggcgtctttatcgatctcctgggcgcccgggaaaccggcaatctgctttttctccgcctgccaggcggtgagggcggccatatcgattccgccttcgttatacagggtcgcggtatgatcctgaataaccacgatacgagcgccgacgccggcgaacaggcgggccgcttcgctaccgacgttaccaaagccctgcagcgccactttggcgccttcaatttcgataccggcgcgacgggcaacttcccggccggtgacaaacacgccgcgtccggtggctttttcacgaccgagggagccgccgaggtggatcggtttgccggtgaccacgccggtgatggtggtgccatggttcatggagtaagtgtccatcatccatgccatcactttgccattggtgccgacgtccggcgccggaatatctttctgcggcccgataataatgccgatttcgctggtgtaacggcgggtcagacgctccagttcaccttccgacaaggagaaggggtcgacgcggatgccgcctttggccccgccgtaaggaatattgaccgcggcgcacttaatggtcatccaggcagaaagtgccatgacttcgttaagatcgacatccggatggtagcgaacaccacctttacccggtccgcgcgacagattgtgctgaacgcgatagccctcgaagtggcggatggtgccgtcgtccatttgcacaggaatgtcgacgatcagcgcgcgcttcggatggcgcagggtttccacccagtaggcaagatcgccgagataaggcgcgacgcggtcgatctggcgcaggtaggtggtccatggagatgtactactttcagatgcgtaagataacttttccataagagtcctgtttctcagtgttatttatgtcgtgtaaaaccgtggaatagctacagcagtaaactctgtgcaatgaatggtatcaccaattttataaagcggtatttgacggcaattccgatttttaaatttttgttagattttttattttttaagtgaataactacgcacgtcaaccacccgcaagctgtgcattttaattcattttttattcacttaagtgcataagaaaatattttttctatgtttttcattatcttgatgatcttcaaaaagtgaataaattgcttttgtccgtattgacaatcttgttgttcacaggccagcattagcccacacaacaacatggcattaaccatgaattaacaattacccgcaaaaagaatagggctttatttttctgtggtgaatatttttaccatcgcagcgggcgcgctcgtgcccaaaataagccgaggggcagggttaatgtcgattgtccaacgcgacgggagcgttttccgtcgtcttacgttccggagataaattatgtcaggcagtatgactcgcgaagattttgacgcttacctggttccctgttttgcccccgcgccgtttattccggtcagagcggcgggctcccgcgtctgggaccagcaggggaaagagtatatcgatatggcgggcggcatcgcagtgaacgccctgggccatgctcacccggcgctggctcaggccctgcaggatcaactggcgaaactgtggcatatcggcaatggctataccaacgagccggtgctgcagctggcgaaaaccctcgtgcagtcgacctttgccgacaaggtgtttttctgcaactccggcgccgaagccaacgaggcggcccttaagctggcgcggaaatatgcccacgataagtttggcggtgaaaaaagcgaaattatcgccttcaaccacgccttccacggccgcacgctgttcaccgtctccgttggcggccagccgaaatattccagcgattatgctccgctgccgcagggcattacccatctgccctataacgatatcgaggcggtcactgcggcgatctcctcgcgcacctgcgcggtgatcgtcgagccgattatcggcgaaggcggggtgatcccggcggacccggcgttcctgcaggcgctgcgtaccctctgcgatcgccatcatgccaccctgatattcgatgaggtgcagaccggcgccgggcgtaccggccatctctacgcctaccagcattacaacgtcgtcccggacattctcaccagcgccaaagggctggggggcggcttcccgatcggcgcgatgctggcgaaagaggcctgggcgcaggtcttccagccaggcacccatggcaccaccttcggcggcaacccgctggcggcaaccgtcgctaacgccgtgctggcccatctcgatgcgccgctgctggcgggcgttggcgagcgccatgcgctgatcgttgaccagttgaatgcgatctctgcccgttacgatgcgttcagcgccgtgcgcggcaccggtctgctgatcggcgctgagctggcggggccgctgcgcggcaaggccaaaacgttgaccaacctggcggcggaagaggggctgatcgccctgattgccggcccggacgtgctgcgcttcgcgccggcgctcaatatcccgctggcggatattgcggaagccttcgtgcgccttgatcgcgccgttgcccgcttaacccgctaaccgggaggacggcctgtgatgctatttcgtcccgtacgggaaaacgatctcgacgacatcgtccgcctcgccgcgcgggcgggggtcggcatgacctctttaccgcatgacgtcgggcgcctggcggcccggatccggcgcagtatcgagaccttcgccggcgaactgccgcgcagccagcagggtttcctgtttgtgctggaggacaccgcgctggcgcgggtggtgggggtgagcgccattgaggtcgcagtgggcctggacgagccgttttacaattttcgcattcagaaaacggtgcgcgcctcgaaagcgctgggagtctataagccccaggagctgcttaatcttagctatgaccacaccgggcatagtgagctgtgtacgctgtttctcgacccggcgtatcagcgcaaccgcaatggtctgctgctctccaaggcgcgctttttatttatcgccgcctttcgcgagtggttctccccgcacctgtttgccgaactgcgcggctgcagcgatgagcagggacagtcgccgttctgggatgcgctgggccatcatttcttcgacatcccgttcgccgatgccgaccggctgaccggcaccggcatgaaaacctttattgccgaactgatgccggcgtacccgatctatatctcactgctgccggaagcggcccgcggggtcatcggtcaggtgcatcccaataccgccccggcgcgggcgatcctcgagaaagagggtttcagctggcgcggctcggtggatattttcgatgccggtccggtgctggaggcggacaccgatcagatccgcgccgtgcgcgacagccagcgcctgcctgtccggcagctgatgggcgacctgccggcgccgaccctcgtcgccaacggtcaattcgacaactttcgggcgctgctggtggcccacgaagagcaggtctcgcttgacagcgccgcgctggacgcgctgcaggtcagtgaaaccgaccgcgtttatacggtaaccctgaatccagaggacaacagatcatggcggtaaaagcacagtttatagccgggcagtggctgccaggcagcggcgcaacgatgagcaaactggccccggaggatcagtcgctgctgtggcaggcggccagcgcgggggctgacgacgtccaggcggcctgcgccgcggcgcgcgcggcgttttatccctggtcgcaccggccgctggccgagcgtattgacgtcgtacagcgttttgccgcgctgctggagacgcataaagaggcgctggcgaccctgatttcccgcgagaccagcaagccgctgtgggagacccgcaccgaagtgcaggcgatgatcggcaaggccgcgatctccatcgaagcctatcaccagcggacgggctttcatgagtcgacgctgccggacggtaaagcgctgctgcgccacaaaccgcacggcgtgatggcggtctttggcccctacaacttcccgggccacctgcccaacggacatatcattccggcgctgatcgccgggaacaccattgtgtttaaacccagcgagctgacgccggctaccgctgaaatgaccgtccagctgtggcagcaggcgggcatccccgacggggcgatcaacctgctgcagggcggaaaagccaccggccaggcgctgctggaaaatcgtgatatcgacggcgtgctgttcaccggcagcgcggcggccggtttccacttccatcgctacttcggcgccagccggagaagatgctggccctcgagatgggcggcaacaacgcactgatcgtcgccgacgcggccgatatcgatgcggcgctgcatgtgattatccagtcggcgtttatctctgccgggcagcgctgcacctgcgcgcgccggctgatcgtgccgcgcggcgagcagggggatgcgctgctgcagcggctggtagaggccagcgcgcagatccgcgccggcaagtgggatgatctgccggcgccgtttatgggcggggtgatctctctcgacgctgcgcagaacatgctggcggcgcagcaaaaactggaggggctcggcggcaaggtgctgctgcgcatgcgccagcctgacccgcgctccacggtgctgaccccggggatcgtcgacgtcaccggtattgaggtgccggatgaagagtactttggcccgctgctgacgattatccgttacgacggcttcccggaggcgattcgcctcgccaatcagacccgctatggcctggccgtcgggctgatctccagcgatgcggcgcagtttgatcagctggcggacgaggcgcgagccgggatcgtcaactggaacaagccgctgaccggcgcatcgagtaaagcgccgtttggcggggtgggcgcctccggcaaccatcgcgcggcagcgtggtatgccgccgattactgtgcctggccgatggcctctctggtcagcgatacgctgacgcttccggcgacggtatcgccgggcctgccattctgataacggatcctgtgaggacatatgtctggttttgaagcaaactttgatggcctggtcggcccgacgcaccactacgccggactctccgtcggcaatgaagcctcgcaaaataaccgcgatggtctctctaaccctaaaaaggcggcgctgcaggggctgtataaaatgaaagccctggccgatcgcggcttcgtgcagggcattctgccgccgcagccgcggccgaatctgcgtcttctgcgtgaagtgggtttccagggcagcgatgagcaggttatccggcaggcggcccacgcggcgccgcagctgctctccgccttcagctccgcctcgtcgatgtggaccgccaacgcggcgaccgtctcaccgtcggcggacagcgccgatggcaaagtccatttcaccgtcgccaacctgaacaataagctgcaccgtatgcaggaggcgcccaccacctcggcgatccttggcgccacgttcgccgatccgcgctactttgcccaccatgcggcgctgccgcagcatggcgacctcggcgatgaaggggcggccaaccataaccgcttctgccgggaatatgaccggcagggggtgcagtttttcgtctatggtcgacgcgccagcggcggtatcgccccggtgaagtatccggcgcggcagaccctcgaggccagcgaagcggtggcccgcctgcatcagctggatccgcgctacacggtgtttgcccagcaggcgccgcaggctatcgatcgcggcgtgtttcataacgacgtcatcgcggtcagcaatcgccatgtgctgttccaccatcagcaggcgtttgtcgatcaggcgacagtgctggccacgctgcgggctaaaagcgacagtctgaatatcccgttcaccagcgtggaagtgccggacgagcgggtttcgctcgacgacgccgtagcctcttacctgttcaacagccagctgctgagcaaaccagacggcaagatgctgatcgtggtgccggaggagtgccgccagcgggaaaacgtctggcgctatctcagcgatctcgccgccgatagcgcatcgccgatcgatgaagtggcggtctttgacctgcgggaaagcatgcgcaacggcggcggcccggcctgtctgcggctgcgggtggtgctcaacgaggcggagcgccaggcggtcaacgcccatagcctgatgaacgacgaacgttatcagcagctgacggcatgggtggaaaaacactatcgcgaccggctgcatgcccgcgatctggcggacccgcagctgctgcgcgaggtttatcaggcgctggatgagctgacgcagatcctgcgcctgggcgcggtctatgattttcagcgttaaggagcggcagatggagcacctggttaacgatttactgcactgccgcctgcaggcgtggacctttccggcgggcatcgaggcccgctggctgggcgagggcattttacagctgctgccgacggcgccgtggcgccaggcgacgatcctctccgccggcgtgcatggcaatgagaccgcgccgattgaactgctgctgcagctaacccacgatctgagccaggggcggcagccgctcacgcaggcgctgctgatcgtctttggtaatctgccggcgatccgcgccgcgcgccgctatctgcataacgacctgaatcgcctgttcggcggccgccatctggcggtcaccccgggaaatgagtcgcggcgggcttttgcgctggagcaggcggtgcaggctttttatcgcgccgccgatgcggcggggccggtcaaccgtggtcatctcgatatgcacaccgccattcgcggatcgctgtatcgccagtttgcgctgctcccggcccacgccggggatttttcgcccgatttctatcagctgctgcaggccagcgggatggacgccgtcgtgcgccataccgaagcgggcggcaccttcacccatttcacctgcgaaaagttcgccgcgcaaagcgccaccctggagctggggaaagtgatgccgttcggcgccaacgatctcagcctgttcgccgccgccgacgcggcgatccgggcctggatcgctgacgcgccgctgccgccgcgcgacaaagcgccggtggactacttcctggtcgaggagagcatcatcaagcgcgagggggaatttacgcttaatctcgcggcagacgttgaaaacttcaccgcgctcccggcagggtatgagatcgcccgccaggcagagaaacgttgggtggtgcaggcccgggccccctatatcctctttcccaacgccggggtcgccaccggccagcgcgccgggctgttgctccgcgccgctgcccttcgtctcccgcaaccagcctgaggaaacaccatgactgaacatcaacatcaggcgtcacctgccgccggaggtgaaggcgcgtcacagcttaagcgcgggctcagcgcccgccatatccagatgattgccctcgggggcgccatcggcaccggactgtttatgggggcggggcgcaacatcgccgtcgccggcacctcgatcctggttatctatgtgctggtcgggttctttacctatatggtgatgcgggcgatgggcgagctgctgctcacccgccatgactaccgctcgtttgccgactttgtcggcgagtatctcgggccgcaggccagcttttacctcggctggacctactggctaagctgggtggtaacctgtatcgccgacgtagtggtctgcgggagctatatgcagtactggttcccggaactgtcggcgtggatgccggccctcagcatgctggcgattctgttcctgcttaacctgctgtcggtgaaaatgttcggtgaggcggagttctggttcgccctgatcaaggtgatcaccattatcgccctgatcggcaccggcggctggatgattgccaccggctggacctccccggacggcgtgacggcctccctcagccatctcaccgacccgacggcctttatgccccacggcatcaccggctttttcgccggcttccagatagcgatcttctcctttaccggcattgagctgctgggcaccatgacggcggagacccgcgatccgcagcgcattttgcccaaggcgatcaatgctctgccgctgcggattattatcttctatctgctgtcgatggtggtgatcatcgctgtcgcctcgtggccgggggtgtcggcggagaccagccccttcgtgacgctgttcgccaaggccgggctgcctgccgccgcggcggtgattaactttgtggcgctgacctcggcgatgtcctcggccaacagcggggtcttctccagcacccgcatgctgtacggcctgtcggtggagaagcatgcgcactggcagtttcgtatcctgtcgcgcagtacccgcattccggtgcgcagcctgctgttctcctgcttctgcatgctgatcggcacgctgttgctgtttctggtgccgaacgtgatgaccctgttcaccatcgtctcgaccctggcggcgattatggtggtgttcagctgggggatgatcctcgtggcctatctggtttaccgccgtcagcgtccggacctgcacgccgggtcgatctttaagatgcccgccggggtggtgatgagctgggtgagcctgctgttcttcgcgttcgctatcttcatcatgatctttgacccggacacgctgctggcgctgttggcttctccgctgtggtttatcgcgctgtggggcttctggaagctgaagcagcggcgcgaggggcagcttcagctggacaaccagagcgcctgacacccgccggtcctggcggccggctaagcaggggggaagacttgacgcctgtttgtgcccggtgacggctggcgccttaccgggcctacatgcttaccggacctgggataagcggtttcccccgcggcgcgatccccccaggcccgcgcacgcgcagcgccgccgggcgggatagtcggcgccgtagtagccctggcgggcggcggtcaggcgctttccgcccgggagggggccgtgctcagcgcggacttcatccggctggcgcagaatatcgccagcagcgaaatcgccaccgtaacgcccagataaacggccaccggccgccagtcaccgtcatatttcgccagcagaccggtggcgataagcggcgcggtgcccccggccagcgcggcgcccagctggtagccgagggtgatcccggtatagcgcacattggcgctgaaaatctcagagcacagggtgccgagcaccgcggttaccggcgcccacaggatgccgaaggcaacggtcgtcgccagcatgatgccccagccggtgccggtgtcgagcagcaggaaccacgggacgataaacagccccagcagcaccacgctcagggtgtacatcttttgccgacccaccttgtctgacagcagccccatcagcgggatcatcacggtggccaccagcgcgcccagggtcacggattccagcgcctgcgacttctgatagctcagggtggtggtggcgtagctgactacaaaggtggagaagatatagaagggggcggtctccaccactttcaggccggcggcgatcagcacttcccgccagtggtgcttgagcgtatcgcgcagcggggccttcgccacctggccggattttttcacctgcttaaaggcgggcgtttcgtcgatatctttgcggatccacaggccgagaaaaacgaggacggagctgagcaggaacggtatgcgccagccccaggcgagaaactgcgcctcatcgaacagcgtcatcagcgagacgataaatgtcgccatcaacatgccgatggtcaccccggcctggggaatgctgccgaaaaagcctttccgcttttccggcgcgtattcataggccagcagcagcgcgccgccccattcgccgccgatacccatgccctgaataatgcgcaggataatcagcagggccggcgcccagaggcccaccatctcgtaggtgggcagcaggccgatcgccaccgtggcgctccccatcagcgacagggtcagcaccagcgtcttcttgcggccgatgcgatcgccgatatgggcgaaaatcacgccgccgatggggcggataaaaaacgtcagcgagaaggagagccaggagaggatcaggccgataaccgggtcgaccatcggaaagaagattttgttgaacaccagcgcggcggcggtgccatagagaaaataatcgaaccattcgatggcgctgcctgtcaggctcgcgatcagtaccttcttgtttttctgcagaatggatgcagtgttgtcttgtggattgctcattacgaaacgttctcccgccacggtagataggtcaggtgtcactctgtacgagcagggtgcaacctgatgtgaaaaggttgtgtaattgttaagcaacttagggttgaaggttacaattggcaagtttatcgctggcaaactgggcattatggcgcgctttgaactggtataaccgcgacgctattttttattttccacctgattttgctgttttttgttattttcatagtgagttgttcaggtgcaacccgcctgtttttagatgtttcttgttatttcaaaatggttacaaatcgacgccgctatgcctcccggcaggcggcgtttatgatagcgaaagcatcctctccgctcggctgagagaggattaaggagacagaatggcagaacaatttcctccgctgtcggcagcgacgctggcggcggctaaccaggtcggcgcctggctggcgcaggacgatctggcgacgctgcccgcgctgccgcaggtggacgtggtagtgctggccggcaacgccgtgatcccaaccatcgacgccgcctgccgtctggcggcggtgcaggcggtcccgctgctgatcagcggcggcgtgggacattctacgggctatctctacgaggcggtgcgccaggatccccgttaccgtacgttgccggtggatggccgcccggaagcgcatgttctggccgacattgctcatgactactggtacatcccccattcgcggctggtggtggaggaccagtcaaccaactgcggtgagaacgcccgttttacccggaccacgctggagagccgggggctcgcccatcgtcgcgggatcgtcattcaggacccgactatgcagcggcgaaccatggctaccttcgcccgcgtctggcagggggcgacgacgccgccgcagtggctgagctttcccggctgctcgccggtgctggagcagaccgatggccaactggggttcgcgggcggcggagcggggctctggccggtcacccgctacctggggctgctgctgggcgagctgccgcgcctgcaggatacccctgaagggtacggtccgcggggaaaagacttcatcagccatgtcaccttcccgccggagatcatcgatgcctggcgacagctgcgggaggacgcccagcttgccggggcgctgcaggcccgcaccctcggctgaaaaatgcccgtttacggcagattcgtcgcaaacgggcaatttgtgttattaaaatgtaacctcaagcgggcatttttggcccgtttttatgaatcagctcacagaactgcgtcaatgtgctgccgaacagcggcttatccgcccgacatttaacaaaaaaatcacctgttaaatacaaatgcaccacaggagcagccatgacagcacccgttcaacacccgatgtatattgatggccagttcgtttccggtcgcggcgacggctggatcgacgtgcttaacccggcgaccgaagcgctgctgtcgcggatcccggacgggactgccgaagaggcagggctggcgattgacgccgccgagcgcgcccagcccggctgggaagcgctgccggccattgagcgcgcgggctggctgcgcaaaattgccgccggtatccgccagcgtgccgacgagatcgccgggctgattgtcgctgaaggcggcaagatccagcagctggcggcggtggaggttgcgttcaccgcggactatctcgactatatggcagaatgggcgcgccgttacgaaggtgagatcgtgcagagcgatcgcccgggggagaatatccttgtctttaaacgcgcgctgggggtgaccaccgggatcctgccgtggaacttcccgttctttcttatcgcccgcaagctggcgccggccctgatcaccgggaataccatcgtcattaagcccagcgaatttacgcccaataatgccatcgcctttgccgagattgtccatcaggttgggttgccgaaaggggtctttaaccttgtgcttggccgcggagaaaccgttggccaggagctggccggcaatccgaaggtggcgatggtcagcatgaccggcagcgtggcggcgggagaaaaaattatggccgctgcggcgaaaaatatcaccaaagtgtgcctcgagctcggcggcaaagcgcctgccattgtaatggacgatgcggatctggagctggcggtgaaagcggtagtggactcgcgggtgattaacaccgggcaggtgtgtaactgcgtcgagcgggtctatgttcagcagggaatatacgaccgcttcgtcaaccgcctcggtgaggcgatgaaggccgtccagtttggcgacccggcgacgcgggatgacatcgcgatggggccgctgatcaacgcggcggcgcgggaccaggtggcgggcaaagtggcgaaggcggtggcgcagggggcgcgggtggcgctgggcggtcagccgctggagggcaaaggctatttttatccgccgacccttctgctggatgtacgtcaggggatggacattatccatgaggaaaccttcggtccggtgctgccggtggtggccttttcgaccctcgatgaggcgctggcgatggccaatgacagcgattatggcctgacctcctcaatctatacccgcgatctgaacgtggcgatgaaagcgattaagggactgaagtttggcgaaacctatatcaaccgtgagaactttgaggcgatgcaggggttccacgccggctggcgtaagtcggggatcggcggcgcagatggccgccacggcctgaatgagtacctgcagacccaggtggtctatctgcaggcctgaggcactccacacagaaccggcggacagcgcaggctgtccgccgttcacttagcgggcaaatttctccagcacgcggatcagttgggtgacaaagccgtattcgttatcgtaccaggcgacggttttcaccagctgtacgccgccggcctccacaatctccagctgggtagcatcgtagatcgaaccgaaatggctgccgatgatatcggaagagacgatctcctcttcggtgtaaccaaaggattcattgccctcagccgcctgtctcatcgcctgattgacctcatccgcagtcacctttttctccagcaccgataccagctccgtcactgagccggttttggtcggtacgcgctgggcatggcctttcagcttaccgctcagggcagggatcaccaggccaatggcttttgccgcgccggtagtgtgcgggataacgttttccgccgccgccctggaggcgcgcagatcttttccgcgcggcccgtccaccagcgactgggtgccggtataggcgtggatggtggtcatggtgcctacggtgatgccgaaggcatcctgcagaactttggccatcggcgccaggcagttggtggtgcaggaggccacggagatgatggtgtcatccggggtcagggtgtcatcgttgacgttgtagacgatggttttcatctcgccggcgggggcggaaatcagcactttgcgcgcgccggcctggagatgggcttgcgatttctcggccgaggtgtagaacccggtacactccacaatcacctcggcgcctgccgcctgccatggaatatgctgcgcctctttttcggcatacaccgtaatggttttgccgttgacgatcagcgcatcttcggtaaagtcgacgctccacgggaaggggccgtagtttgaatcatgcttcaacaggtaggccagcacctttggcgaagtgaggtcgttgatagccaccacttccaggctgctgtcgacttctaataaacgacgtaacaccagacgtccgatacgaccaaatccattaatcccaagtttactcatggatattctccggttggtaaaacgactcgatgtgatgaaactcctccaggcttagccctgtccccctgattggtcaactgacaatctgtgcgctttgccagggcctgcgggccggagaggggaaaagtgaatgttttcccggtcttttttgcccgtgacggcagggaatgatttttgttaccagagatgagggggctgcctgctggcgaaacgacgaaaagcgtctatgcttaactattgaatagcttagtaaaaaattgacgttagacgaagggagaggttatgggattctggagaatcgttttcactatcattctgccgccgctgggtgtgctgctgggaaaaggcttcggctgggcgtttattctcaatatcattttgaccctgctgggctatattcctggcctgatccacgccttttgggtgcagacccgcgattaaaggctgaccctcgccgcctccccctgagaccggctcaggggggcatcaggcactctttatacaacagcgtattatccttcgaccagtagtgccgggtctcctcttccagatcgacgatccacttaaataccccggcgctggcaagatcccggcagtactgttcaaagttaatggcccgggcaaagtggcggataacggcggccctggtcagacaatggctggcctcagcgcgaacgcgcagcagcccgcgggcgctttttaccgagaccacctcgtcgtttgccattacgaaattcatattgccggtggaaacaaaatagatgtagtaggagacctgatgccgacgcagttcattggcgaaggtggcatagtcggcgtcagaacgcgcttgctcaaaaaaatgacccagcctgaccagcagttccatttcgatccttatcgtgtcgctgtgtgcggctttggccgatagcggcagaaaccattcactaaataacttattcgcattttaataatataggcgcgttatattaatggttattgcgtaactggaacacggtttcaagtgttacaatctattgcaatcgtttggctacctggtcagcgatgcgtaagcgaacggcgaggcgggaacaaggagacaagcgccggcggggaaggccgccgacgggaaaacggcgctacttctggatcaaatagcgaatggttgggccatcctgttgaatatccagcaccgtgtagccgtggttccttgcatcaagcggaatgttattgatcgactgcggacagtcgctgaccacttcgaggatctcgcctttttgcagggaaggcattgcctccagggtagcgaccgccggatacgggcagggttcgccgaccatatccaggcgataatcagggatgatgtttttcatgcgctctccttcacggtccggaccgccgcctggcggcggaaaaaatgtctctcccaggcgatcaccagcagcagggcgatcagcagcagtagataggtggccagtagtccgccaaagggaccgaaggcgttcagcaggttgactttctgccagtgggtggcgagcggggcggcgatatcgtcccagcaccaggcgagcagcgttgagccgatgacgttgcccagcccaacccaccagtagtgaacctggccctccaccgcccggtacatccagccggtctcacagccgccggccagcacgatgccaaagccaaatagtagcccgccaatcgccgcattaggaccggcccacataattttcggcgccatccccaattgcacatagctgaagataccgatggcgctcgccgccatgccgaagataatcgccttcgccatcaccgtccggccggtgatccacatatcgcgaaaggcggaggtaaagcagatctgcgcgcgctcaataagcaggccaaaggcaatgccaaacagcatcgccaggccgagcgccgggtggtctgcggcggtgagcaggccccagccgatcatggcgaaaaagaccaccatccccaggcggaaacggcggcgcgcctgctgcggtttttgggttaacggcgaggcggtggacaccttttgtatttttaccgggatgcgaaaaaggggcagcagcgtgaagcgggcgccaaaccaggagccgatggcggtggcgatggcaaacagccaggcgtgcagggagaactgcggaatgccggtgaagaaggccgccaggttgcagcccatcgccagccgtgcgccgaacccggcgatgatgccgcccgccacggcctgcgcaatgcggatccggctgcgtggcaagcgcagtttgacgttattcgcccacagcgcggcggccaggcagccgccgaacatgccgatgatcatcctgccatcgatgcgggtcagcggcgacccttcgagatgtatcagctggtaatagccccactgttcgctgtggacgcccagcagctgcagcagctgaccaccccagcgggtgaattcgccggtcaccgcccagaaggtgccggtgatgccaaaatagtaggtagagagaatgcccgcggcaatgaccgccgggacaggagaccagaaccggataagccaggcctgtttgaaggattgccatgtcataaaaatgcctctgaactcagaaggtattaacggtcgatgaccgaccaaagggggcaaatagtacccgccttagcgcctgctttctctgttttggatcaaggccctacgcttgcgtcagcacggcaaccagcgccagcagcgcgggcagcgcctgaatatagagaattttgcggctggcggtcagcgcgccgaaaatcccggcggccagcacgcaggccaggaaaaagataaccacctgcacccccggcgcccccagccacagcccccatgccaggccggcggccagaaagccgttatacaagccctggttggccgccagcacccgggtctgccgggcgaaatcggcgctgaggttaaaggcccggcgcccggcggagccttcccagagaaacatctccagcaccaggatggcgagatgaataatagcgaccagcgcaacgaggagagtggctaacacagcggtccttaacgattaggggaatgtttctccagtataaccgcaggcgctcaccaggctagagggcgactgctatagtgcagatagcgtcatattttcccgccgcgaagagcgtcggtttatctgattgccctttggtttagctaagcggtgctagcatgccgggttctttttacgggtatggcataggttactgaatggtaaataaattatggattttgttatcagggctactaatggttgccatgccgtcggcgcaggccggggaattaaacctctattcgatgaataccggttcctatgtctatcatatgacgggtaaccacggacaatataacgaacatttcaataacaactttttctcggtggagcgcaagttttctcaggattcaaaatacagcgtgctggtcggaacgatgaaaaacagctttgacgatcgttgcctgactctcggcgtgcgccgcgactggctgaaaaacgataccggctgggtactgaaaggggtgtatgcctataccggggaatttttctttgatgccttcagccactgtggggattccggcacctaccgcaccgccaaaaaaatcaccggcatcggtttttcgccctacctctatcatggcctgcaatataatttcaccgattatttcggtgtggaaggcggcattattgtgccggcgatctttgtgatgagtgttcagtggagctttcgctagacgctttatttcccgggaaaagagcaggccaccacaggtggcctgatactgatgacctggcggcaggaattaatggaagccgagacggatcagatccaacgggcagaagcggccctcgcagccgtcgatttcaacgcagtccgcccggcgcagctgctcagcggttttcccctcgccatggatagctttaatcacgcccgtcgtcccgttaccggcgatcattaccatgctgccggtagcaatagcgttacgattacggtcataggttttcatggtctcctcctcaataaacctgggtgaaagcaatgattaagcgcgcaaattaataccgctttctgcctaaaaaagttttgaggataatcaaatttattttaataaccacctgagcataaaggcaagaagaccttatgttcgcctccatcgcatcgcctgcgcggcgaggggatgaagcgtgatactgtccgtcatatgtcagccaggttactgttttatgaccagattattaaccttgccagcccgcggaaaatagcgaaagatggcactattagggcatcaacggtgccagtgcctgtcctgagggagccatgagtcaagacgtcaccgcgaagatgttaaagcccgattttgatagtgaagtttccggcctggtgcatggctatttgtttcatgaacagcgccccccgcagccgatcgcctctggcgaggtctgcgcccgctatcaggcgctcgccgatgacaaggcgtttatctggttacacctgaatcttaatcacgccaccgccgagaaatggttaaccagccactttccggtggccgattttttcttcgaggagatccgcagcggctcgcacaccacccgcattgagcgacagggggaaaatctgttcgctgtgcttaacgatgtgctgtttcgtccgcaggataccagcgcggaaaccgccacgctgtggctctactgtagccccaggctggtggtgacggcgcgcttcaaaccgttgcggtttatcgaatggatgctgccgcgcttgcagacgctcagggtgaacacgtctactgagctgctggcctttctgctggaggagcaggaggaggtgctggagcaggtcgtccgccaggccagccgccatgttgaccttattgaagagcgtcttctgagcaatcacgtgcagcgcaaccgggccgatctggcgcggctacggcggatgcttttacgcttccagcggctgctggcgccggagccggcggcgatgttccggctgcttaaccggccgccggcgtggatggatcgcgcggtggtgcaggcgtttcgtcagttcaccgaagagtttagcgtggtgcttaacgatctgtcgggcctgatcgagcgcatcagtctgctgcaggaggagattggcgcccgccagctggagcagagcaatcgcaccctctataccctgacggtgatcaccgtcctcgcgctgccgattaacatcgtcgccggttttttcggcatgaacgtcggtgggatcccgctggcaagcaaccaccacgggtttatcctgctggtggtgattgtcgctgtctttaccctcggcgccggttacctggcgtttcgccggcgcgatgacctgtagattgcgcgtcgaatcagctgaggctgcgcagggcggcaatcagtccttcgacaccgcgttccagcttctcgcgcgggcagccgacgttgagtcgcagaaagccgttgccctcaggaccataggtataacccggcataatcgccaccttctgttcggcgatcagcgcctgctgtagcgcgcgatcgtcaacgttgagcgggcgcaggtcgatccatgccaggtaggtggcctccggcggctgccagcagagcgcggggaaggcgttgttgagcgtgtcggcgacatagcgcatattcgcctgcaggtagtcgcgcagggcatcgagccagggagccccgtcgcggtaggcggcgatatgggcgaccagcgccggcacggaaggggaagagagcccgtcgcgaccctttagcgcctgcaggtagctgtcgcgctcgttctcttcggggataaagccgtaggccccggtaaaggccggaatattgaagctcttcgaaccggaggtgaacagcgcccatggtccatgagcgacctcgctccacgggatatggcggtgttcgccccaggtcatgtccatatgaatttcgtcgctaatcaccctgacgccatgtttttgacacagggccgccatggtctccagctcctcgcgacgccagactttccccgttgggttgtgcgggctgcacagcagcagcagggtattctttggctccgccagcgccgcctccaggcggtccatatcgcagcgccaccgattatccttcaggatcaatggcaccggggcaatccgccgccggttagcggtgatggtgttatagaacgcatcgtaggcaggggtgtggaccacgacgccgtcgccttctttcgaccactggcggatggtttccgccaccatatagataaccgacggtccgtagaccacagattgcggatcgatgtcgctgttaaagcggctggcgtaccagtgggcaatcgccccgagaaacgcctcgttgcgccagcggctgtagccgaacaccccgtgggccagccgctggctgacggcgtcgagaatacagggcgcggtggcgaaatccatatcggaaatagtgaacggcagcagatcggcggcgccaaaccggtcggcgacatagtcccattgcgtgcaccaggtgccgtggcgatcgataggggtggcaaaatcaaacattggagcttccttagcgagcgccccctccgtagcagagggggactagtgggatcaggcctgcacggtattcatcagcgtggccatctcatcttttaccgactgtacctgcgggccaataaccacctgcagattatgctggttgagctgtaccaccccgatggcgcgatgggctttcagcgcggcggcgtccactttgctcatatcgtgcaccgacaggcgcagacgggtaatgcagttatccagcgaaacaatgttctctgcgccgccgagcgccgccagaatcgccggtacgttatacccggatttgccgatggtaccggcgacggctttctccacgctggcggcagtgtcgatgtcgcggcccggcgttttcagattgaagcgggtgatggcgaagcggaagatggcatagtagaccgcgaaccagatagccgccaccaccggcaccagataccacttggtggccaggccatgcagaatgccaaacaccacgaagtcgatgatattgccgtcggtgttgccgatggttaccccgagcaccgccatgatggtaaagccgagaccggtcagcagcgcgtggatgacatacaggaccggcgcgacaaacaagaacaagaactccagcggctcggtggtgccgccgaccacgcaggcgatgaccccggagatcagcaggcctttaattttatgtcggttttccggacgggcgcagtggtacatcgccagcgcggctcccggcaggccgccgaggaatgccggcattttaccctgcgacaggaaacgggtggcgctttcggcgaagccgtgggtcgtcggacagctcagctgcgcctggaagatggtcagcgcgccgctgacgctgtggccgcagacgtcgagggtgccgccggcttcggtaaagcggatcagcgccaccagaatatggtgcaggccaaacggcagcagcagtcgctcgccagtgccgaagatcatcggcccaaaatccccggcgctgttgatcatcttcccgagggcgttgatccccatggcgaagactggccacaccagcgggatcgccagcccgaccagccccagcaccacggtggtgacgatcggcacgaagcgggtgccgccgaagaaggccagggcgtccggcaggcgaatgttatggaagcgttcatgcagcagccagacgataatcccggcgatcaccgccccgaggatcccggtatcgattgacggaatgccgataatgttctggatattgttggccttcaggatcgcggcgtcggtggtgggcagaatacccttcgcggtcagccagaagttgaccgccaggttcatgaccgcgtagccaacgaagccggcgaaggcggcgacgcctttgttctctcgcgccagacccagcgggatggcgatacagaacatgaccggcaggaagctgaaggcaaaggagccgaccttgctcatccagataaagatggcctgcagcagcggcatatccagccacggcagcagagtcaaaacatcgtgactgcttagcgagctgccgatccccagcatgatcccgcaaaacgagagcaacgccacgggcagcataaaggtttttcccagctgctggaaaaattcccacaaggtgatttttggtgcggttttcgccgtcatagcacggttcctgattctcaagtggtcgggaagaactaacgccacggcaagataaaacgttttatcgacaggcaagggagtcagccagcaggttatggcaatcgcaaaaaagatcaccatcaatgatgtggcgctggccgccggcgtctccgtgagtaccgtttcactggtactgagcggcaaagggcgcatctccagcgccaccggcgagcgggttaatcaggctatcgaacagctgggatttgtgcgcaatcgtcaggcggcctcgctgcgcggtgggcagagcggcgtgattggccttatcgtcagcgacctgtcaaaaccgttttatgctgaattaaccgccggcctcaccgatgccctggagaggcaggggaaaatggtatttctcacccagggaggccgcagcggcgagaagatggcccagcggtttgatacgctggcggcgcagggggtggacggggtgattatcgccggggcgatcgaccgcgggagcgagctgcgcgagcgtgcggcggaggcgggggtgccgctggtgtttgcttcccgcgccagctatcttgacgatgtcgacctgatccgcccggacaacatgcaggcggcgcagctggtgacggagcatcttatccgccgcggccatcagcggatcgcctggctcggcgggcagagtgcttcgctgacgcgcgccgagcgggtcggcggctattgcgccaccttgctgaaatacggcctgccgtttcacagcgaatgggtgctggagtgcgagtccagtcagaagcaggcggcggaggcgatgaccggcctgctgcgccagaatccgaccattaccgcggtgctgtgctacaacaacgtggtagccaccggcgcgtggttcggtctgttacgggctggaagacagagcggggaagatggcgttgagagctactttgagcagcgggtggcgctggcggcgtttgccgacgtgccggaggccgccctcgacgacctgcccctcacctgggtgaccaccccggcgcgggagatggggaaaagcctggcggattcgatgctgcggcggctggaagaggggactggcgagacgcgaaaccagattatgcccccgcggctggtgacgcgaaaataagggagacggcgcgcgctggccgtctcctgtaccgataagttacggctgcggggcggcgtcgtcctgctgaggagcggcgtcatcctgctgcggctggccttcctgctgcggctggccttcctgcggcgcgctgtccggcagcgaaggcgcttccagaccaaacatcgcggcaaagtcttgcagcggcattttctgtccgttcagcgtcacctggccgttcgcgtactgcagactgctgctgatggcgttatcttccatggtggtaatgcggaacatctggcccatcgccgccaggcctttgacctgctgatcggcaagcttggcggcatcggccggctgatagccttccagaccggcgatcttagtcataaactccgtcgccatatccaccgggatcaccactttgccgtccagggactgcaccacgcgatccaggctgtccgccagggtctgcggcggagcggtcacctgggccggatccttcagtagaaccgagaggttgagggtgctttcgcctttggcattgcgccagctcagcggagagatggtcaccgacgggttgcctttgagcaggatcggcagcgcattgaacagcgtttcggtgagggcctgctgatacagctccggattctgcgccagctccggtttcgccagcagcgcctgagactgcgcgctgtactgctgactgaactggtgccacgcctgaccgtcgacgttatccactttcagcgtgagtttgccgctgcccatatcctgcccctgcagcttgaggctgttgacggtgtagttcacctggctgttcacgcctttgccgtcctgggtcagcgtcgagccgccgtccagcgccatgccgtcgatcagcgccagctctttgccttcgacgctgatggccagtttatcgagggtcattttttgctggccgatacgttcgttgaagctggccagctcggtggcgccgtcggtggtcaggttgacgaagcgcagctgtaccttctgattatattcgttgagcgcatcgatctgcccgctgccggcctggcccttcaggctgatgtttttgccgtcgcggtcggcgtcgagctggaactgaccgccgctgaaggtgactttctcatcgcctttagcgtagtcgagggcgttaaggacgatagccgactggctgtcgccgctgtaggcaatgcgcgtatcgacggtaaagggggtgtcgcctttggctatctcgaacagcgcctggctggcgtcgtttttcaccagcgtggtgtggacggaagccattgccggcgccagattaaaggcttttaacgaggccagcgggaaggggccatgatcgaccacttcgtcaagcaccacgctctgcccggcggccagccagccgttagcctgaccggcgatcggcttcaccaccagctgcagatggctgctgaacagcccgcgctggtagtcctgatagctcagctccagacctgactccggcgcgctgctgcgcagctgggcgtttgcctgctgcaccatatcggcgatccggccttccagctgtttaccggtgaaccaggcgccgcctgtccataccacgcccagcgccacgatgactcctgctgcgaccagcgattttttcatagcatttatccataaatgaagccaggcggagagaccgcctggctgagttatcaccaacagtaagcgcgacctgaagggtcagtcgcttactggagcttattgaaaacgcgcgccacgcggccgcggccgctgacctgcaccggcgattcactggcggccacgaaggccgactcgcccggcttgagggtcaggctctggtcgcctttgcgcagtacggcttcgccgtcgacgcagaacacgatcgccgcgcttgcctgggccagatcgctggcctcggcggagaggtcatgcagggagaaggcaaaatcttccaccgggatcgggaaatcgagttccgcgccgtgacgctgcggctgggtcaacagctcacccgccggtttagcctcgaacttgacgttagcaaccagctcaggaatatcaatgtatttcggcgtcaggccggcgcgcagtacgttatccgagttggccatcacctccagcgccaccccctgcagataggcgtgcggcgtttcagcaaacaggaacatcgcttcgcctgggttcagcttcaccacgttcagcagcagcggggagaagaggccgctgtcgtccggatagaattccgcgatcaggcggattgtctgccacggttcgccttgttcacgggccagtacgtcgcgcagcacctgcagcgccttggccttttcctcaccctgcatatttagcaggctggcaaacagctggctcaggtgagtcgcgtccggctgctgcaggaaggcgccgattgccggatgcgcgctagccaccggctgcagcagggtgacaatctcgctgaactcgcgaaatgcattcatcgccaggaacggcgtcagggcaaaaaccagctccggtttgtggttcggatctttgtagttacgctcggcggcggagagcgggataccggcggcgttctcgcgggcgaaaccttcttccgaggcctgcttgttgggatgcacctgaattgagagcggctgagcggcgcacagtaccttaaacaggaacggcagttcaccaaagcgggcggcaaccttgtcgccgagcagagcggctttatccgcgtcaatcacctcgcgcagcgaacgcggctggccgtcggccgccaggatctgcgaactgctcttcggatgcgcccccatccacagctctgccatcggcagattgtccgggttggcgatgccatagagttcggttaaggcggtgtggcttccccatgcatagttctgcacggcgttaatcagcttttgcattctcaatccctgtttcaaacaaagtaaattttatcgccctattaaaccagcaaacggtggagaagcaactgctgaaagaaaaagtcgtccttgtctcagtttttgttaaaaaattgtgtaagattgttcgactcgcttttctacaggcacatggagtccctgcctgaaacataatcagccaaagcagtaagtgagagtacaatgtcgaataaaccgtttgtttaccaggatccttttccgctcaaaaaggatgacaccgagtattatctcctcagcagtgattacgtctccgtcgccgaattcgccggccaggaagtgctaaaagttgaccctcaggcgctgacccttctggcgcagcatgctttccacgacgcctcctttatgcttcgccctgcgcatcagcagcaggtggcggatatccttaacgatccggaagccagcgaaaacgataaatacgtcgcgctgcagttcctgcgcaactcggatatcgccgccaaaggtattctgcccacctgccaggacaccggcaccgcgatcatcatgggtaaaaaaggccagcgcgtgtggaccggcggcggcgatgaagccgccctggcgcagggggtgtacaacacctatatccaggacaacctgcgctactcgcagaacgcgccgctggatatgtataaagaggttaacactggcaccaacctgccggcgcagatcgatctctatgctaccgatggcgatgagtacaaattcctctgcatcgccaagggcggcggctcggcgaacaaaacctatctgtaccaggaaaccaaagcgctgatcaccccggcgaagctgaaaaattacctcgtcgagaagatgcgcaccctcggtactgccgcctgtccaccgtaccatatcgccttcgtgatcggcggtacctcggcggaagcgacgctgaagaccgtgaagctggcgtccaccaaatactacgatggcctgccgaccgaaggtaacgagcacggccaggcgttccgcgacgtgcagatggagcaggagctgctgctggaggcgcagaaccttggtctcggcgcgcagttcggcggcaaatactttgcccacgatatccgcgtgatccgtctgccgcgtcacggcgcttcctgcccggtcgggatgggggtttcctgttccgccgaccgcaacatcaaagccaaaattaaccgcgacggcatctggatcgagaagctggagagcaacccggggaaatatatccctgagcatctgcgccaggccggggaaggcgaagcggtgaaggtaaatcttaaccagccgatgagcgagatcctggcgcagctgtcgcagtatccggtgtccacccgcctgtcgctgagcgggactatcatcgtcgcccgcgatatcgcccacgctaagctgaaggagcttatcgacaacggcgaggcgctgccgcagtacgtcaaagatcacccgatctactacgcaggtccggccaagacgccggacggttacgcctccggctctttggggccgaccaccgcaggccgcatggactcttacgttgatctgctgcagtcccatggggcgagcaagatcatgctggcgaaaggcaaccgcagccagcaggtcaccgacgcctgccacaaacacggcggcttctacctcggcagcatcggcggcccggcggcagtgctggcccagcagagcatcaagagcctcgagtgcgtggcctatccggagctgggtatggaggctatctggaaaattgaagtggaggatttcccggcctttatcctcgttgatgataaaggcaatgacttcttccagcagatccagacctcgcagtgcgcccgctgcgtgaagtaacccaggccgcccttcggggcggcgctggtcgatgacaaacctgatttcgttagggtgagcgcctttctgccgggcggcggctttcgccttacccggcctacgaaagacagcaatatcaataagttatgcagttctctataggcccgcgcaagcgtagcgccgccgggcaatcccgacgattgcattttgtcagcggtctgggccgcccctcggggcggctttttttatgtcgcttcgcggcacgaaccaccaaaacaacttatcaatctggccaatacttagtcttttaagcaggtgagctttgtcgctatgacgcacttttcatccaaggagaaagtaatgacaacgcatcgcagtgaaaaagactcgatgggcgccatcgaggtcccggccgataaactctggggcgcccagacccagcgctcgctggagcatttccgcatctcgaccgaaaaaatgcccggggagctgatatacgccctggcgctgaccaagcgggcggcggcgaaggttaaccaggatctcggactgttgacggcggagaaagccggggcgatcgtcgccgccgctgacgaagtgctggccggaaagcacgcgcaggagttccccctggctatctggcagaccggctccggcacccaaagcaatatgaatatgaacgaggtgctggccaaccgcgccagtgaactgctcggcggagaacgggggatggcgcgaaaaattcatcccaatgacgatgtgaataagagccagagctcaaatgatgtattccccaccgccatgcacgtcgcggcgctgattgccctgcgggaaaaagtgatcccgtcgctgcaggcgctgcgggcgacgctcaatgaaaaagcggtggccttcagggatatcgtcaagatcggccgcacccatctgcaggacgccacgccgctcaccttaggccaggagatctccggctgggtggcgatgctggaccatagcctgaagcacattgaagccagtcagccgcatcttgccgagctggcgctgggcgggacggcggtaggaaccgggctgaatacccatccggaatatgccgtacgggtggcggccgagctggcgtcgctcagcggacagccatttgtcaccgcgccgaacaaattcgaagcgctggccactgtggatgccctggtccatgcccacggcgcgctgaaaggcctggcggcctcgctgatgaaaatcgctaacgatgtccgctggctggcctccggcccccgctgcggcattggtgaaatcgccatcccggaaaacgagccagggtcatcgattatgccgggcaaggttaacccaacccagtgcgaagctctgaccatggtctgctgccaggtgatgggcaacgacgtggcggtgaatatcggcggtgcttccggcaactttgagcttaacgtctatcgcccgatggtcatccacaacttcctgcagtcggtgcgtctgctggcggacggtatggcgagctttaacgagcactgtgcggtgggtattgaaccgaatcgcgagcggatcagtcagttgctcaatgagtcgctgatgctggttactgcgctgaatacccatatcggctacgacaaggcggcggaaatcgctaaaaaagcgcaccatgaggggctgactctcaaagcctcggcgctggcgctgggctacctgacggaagccgaattcgacagctgggtgcgcccggaagagatggtcggcagcctggctattcgctagccagccagaggtgcaggcgcgggataagcaatctcagcgactgcgcctccggtttgtagcgatactgcacattgtcggcatcatagttcagcagctcgccaatatccggtacgctgacctcccggctgccggacatcagggcgatcagcgggctggggcaggcgtactgtacctgtttctgctcgccggcgtaccagacgcgggcgatcggctggactttcaccggtcgttttattttcagccgcgcccgctgcggcagggcggcgatatcctgatactccctttccagtttgctctgccactgctcccgggtccacggcggcaccgcccgcggcgcttgcaggcttttctccagcatcatcaacacctggtcgcgggtcagattcttgatgacgtgcttattggcccagccgaagcggatggtgctcgggtcgacgaggggcgtcagcgtgcggtaggcgctaagggtgatcaacccaggcaaatgacggtgtacccactcaaaacgggcggtggggggcaggccggagtcgacggtgacgatcttctcgaaggtggccttcagggcattgatatgctgaatacgcgccagcagatcctgctgctccgcggcggtaacctgcaggcagatagcccccggcaggcgtacggcggccttgctgctgcggttttccgattgctgctggataaacagatggctgtagtggcgcagggcgcgcgccagggccgtcttgccgatgtgctgcaccaccggaatggtggccagcggatcgtgctcggcatccttaccgatcgccggcagttcaaatacccggcccgccagcagacggcagtcacttaacgcctgctggagcgcctgcagctccagctcgatctggcgaaaggtattattcagacgttcaacgaggtcgtagctggccattattaccaccttagttacaacatactattagatttttgcagcatacccagcccgcggcttctgcgcaagttttattcaggcagaggtgaaatcaggcagctgatgatagaccggccagctaaagcagaagcgggcgccgccgagagggctggcctcgcagcgcacctcgccgcccatcgcctgggcgatactgtggacaatcgccaggccgaggccgcagcctcctgtcgcccggtcccggctggggtcaaggcggacaaagggctcaaacacccgctcgcgctcctcgggggcgattcccgggccgtcatcctcaaccagcagcgatgcgcgcgaaccctgcagcgtcaggctgaccgccacccgctggctgctgtagcgcagggcgttattgaccaaattatccagcacccgctccatcagtcgcatatccagcgcgccgtagttaccgtgggtcagcgtcgccagggcgacctcgcgctgtgggttaaccatctggatatcctcgacgtgatcgctgatccaggcgggaaaatcgggagtcgtcaggctgagctccgtctgcgggcggtcgaggcgggcgtaggtcaggagctcttcaatcagcgcctccagctgaccgatatcgcggttcagcgcctgcgattccgcctcgctgagattctcgctcatctccagacggtagcgcaggcgtaccagcggtgtcctgagttcatgggcgatgccgtcaatcagctgctttttgctggcaataagcgcattaatgttatcggccatttggttaaaggccaccccgagccgctcgaagctggacatactgtcgaagtgaatgcgctcgctgaggtgaccttcgccaaagcgctgggcggccgtctcaatgcgcagcatgtcctgccagtgcgggcgcatccagataaacaccggaaaggccagagagatagcaataaacgccattagcgccacgtccagcaggcgcatctcatgcagaaaatagagatagggcaccgggcccaccgacagcacatagtggctgcggggaatgcgctgaataaaggtgtactgatcgtcgagggcgacgatatcgccggcgcgcaggtgctgcatcgagctttccgacagcttaaatttgctgatcggctcgatgtgcagatcaaacgataaattcaggtccagctctttaagggtcttgctccagtcgcgcggcggtatctcccgcagctcgctgcgcatcagatacagcgagcttttcatcaaatcgtcaagcgactgccgtccggcgcgctccgcggtaaatttatagaccagaccgaccagcatggtcatcaccagaaagcagacgaagagcagaagatagaactgcacgaacagctttttcattacattaccgcgtattcaagagaaacctgtctggcgccccaggggcatcttctgcgcgtcggggagtcaatgttatcgatatccccgggcgaggcgcggggaaatcatcgatacgctatcaaagcagggtttatgccccctgacaatagccagcctggagacagaacggtgaaaaggtgacagtgtcactcgatgcggtgatttcttcaccctcgggggagcagggcaatcgtattttgtgcgtccatggatacgctactcacgataataaggaatgtctaccggataggtggtcgtgagactcagcagccgacagcgcaccagcttttccgtttcggcataccagtaagcaaactcgccggtggtctggtggtaaatcatctgatcgaggttggcaaacgggatcaccagcagcggcccctggcgaacgtggccgccgccggtttcaaagtgatgctgcccccaggattgctgggtatgttcatagcgatgaaggatcacctcgatttgcccgcgctgcggacagaggagtcgaatatcggcgttgtcgagggaaaaagcccagccagagagagaagtgaacagtgagagtgccaaaagtacaacgtatttcatcatgcaaaagtcctgtgttttcaggctttatgccactctgacagcggtaagtccttgagcacaatcatattgaggagttatgtgatggggttctgtacggctaattctattgatttagtcaatatgacaagttccggtgatgaatgtgcgcgccagggacgaacgcagcaggcagcaaacgtgataactttgccgccggcgagcgcgcgatgagcgggcccctcgcagggccgcagaagggccgcttagttatcccaggcgtgaggggcgaacaggtagcctttgttgcgaacggtcttaatacgatagggctccgtggcgttgtcgagcagttttttgcgcaggcgggagatagccacgtcgacgctgcgatccatcccgtcataggtaacgccgcgtaaatttttcagcagtgcgtcgcggtccataatctgcccggcgtgggtggccaactcccacagcagatcgaaatcggcggtcgacagggcgacgttttctccgccaagcagcacctggcggttgaccgggtcaatggtcagcgagccgaaggagatggttttatgtggcgtgagcgttgaggaggcggatccggcgcctgccggagcaatatgctggcgcaaatgcagacgcagtcgcgcgagaagtaccgctggcggggtggttttcagaatataatcgctggcgcccatctccagggagaggatatggttcatatcgctgtcgagcgaagtcagcaggacaatcggcccttgccattgcccgcgcagatcgcgacagagcgtcattccgtccttgccgggcagcataatgtccagcagcaccagatccggtttctcccgcgcgatcacctcctcagcgcggtcgccgcgaggctcgaccaccacatccatatcatgcttgccgagataggcggcgatcagcgtgcctacctcagggtcatcctcaacaaaaacgattttgttcatgtctattgcacatcagtaaaagaagtaacatacaccgcacttattttacccgccattactcttttataaacagcgttaaatccgctatgctgccctaacttattgattcactgttaaggcatacgggcatggggctgttaatcaaagggctgctgggagcgctggtggtggtgctgattggcgtgctggcgaaaaccaaaaactacgctatcgctggcctggtcccgctgtttcccacctttgcgctcatcgcccattatattgtcgccagcgagcgggggatcgaagccctgcgcgcgaccatcgtattcggcatgtggtcgattcttccctattttatctatctgctgtcactgtggtatttcaccgggatcatgcgcctgccgttggcgctggcaggcgcggtgggatgctgggggctgtgcgcctggctgttaatcctcggctggagccgtttccactagcgcagcgggcggccgccgtcgacagcgaatgagcggccggtaacgtagcggctggtaaacaggtaatcgatgagatcgctaatctctttttcgccaggggcgattttcatcagcgatttatccagcgcctgctgacgataggcctcgtcgtcaccctcattaaacatgattagcgacggcgcgatggcgttgaccttaacctctggcgccagcttgcgagcgaaggagcgggtcatgttatccagggcggctttgctggcggcgtaggcgatatgtttgtcgctcccgcgctccaccacgtaatcggtgatatggataatgtcgctggcggcatggccgtggccgcgcagcaacgcctccagcgcatggttgagcagatagggggcgtggacgtggatctgcatcatgcggttgatgacggtgctcagcgggacgcccggcttttccgccatccagtcgctggcgttatggatgatggcgcgcagaccgtcggtgtgtgatttgaccgcttcagcgaaggtcagaatgccgtcatcgctgctaaaatcggcctgcaggcagagcgcgcccgcttcgcgcaggccgtcaatcgccggatagggcgtacgatagctgacgatgaccggctggcgctgctgcagaaaatggtgtgccagagcgaggccgatgcggcggcctgctcctgtgatcagaatcgggcggggctgttgttcagccatgggtatctcctatgcgttctgcggcagggcgaccgcttaccccaccagcatccacgttgccggcacagcggcaaccagcaataaaccaattagcgccacttcgcggcgtttgagcgaacgatcgtgctggtgcgtacgtcgggcgtacaaaaagaccagaagacccggagcgtaaagtaccaccgacaacagcaaatgcacaggccccgacgcgtataataaccatatgccataaatacaggcgccgatagccaccgctttatgcagcgggcgagtggcgattttcagcagaaaggcgccgaccagcagatagggcacgagaatcatctcagaggcaatggtcagcagcgtgccgtagtccgatccggtcagccagatcagcaccagcgatacctgaacgctgatattggtcaaccacaatgaggcggagggggcgttgttgctattctgacgggcaaacaggcgcgggaaggctttatgagtggcggcgaggaaaggcacctccgcggccatgatggtccagctgagataagcgccgcacaccgacacgatcagcccggcggcaatgacgatctccccccatgaccccatcagcctgaccatcagtcccgccatcgacgggttgcgcatttcggccagttcgctgcgcggcacaacgcccagcgacagcagggtgaccagcagatacaccgcgagggccgacagcaccgccagcagcgtcgcgcggccaacgtcgcgcttgtgtcgcgcccgcgcggacacgactaccgccccctccacgccgataaacacccacagggtgatcagcatggtgtttttgacctgttcccataccggcacgcccagcgccaggccgctaaaatcgaggcggaacgtatccagctgaaaggccagggcggcgagcgcgacaaaggcgcccagcggcagaagcttggcgagggtggccaccaggttaatccccgctgccgtctggacaccgcgcaggaccagaaagtggacgacccacagcagaaccgacgcgccaacgatagactgccaggtattaccatcgccaaacaggcgcagctcaggggtatcggtgaaaaaactgagcgccgaaaagacgataaccagataggagacgttggcgatcaccgcgcacagccagtatccccaggcggagcagaagccgatcagttcgccgaatccttcgcgagcgtaggtgaagatcccgccgtcgaggtcgggacgaatacgggtcaacagcagcatggcgaaagcgagaaacaggatcccgacgccggtgatggcccagccaatgagcagagcggaggggctggccacggcagccatattttgcggcaaactgaatacgccagcgccgagcattgagctaaggaccagggcggtcagggcgctcaggcccagtttcttttccattgcattcccgaggtgaaaatggctgttccagaatatttattttgcgaaatcgcataaaaatggaggattgcgctaaggcgcgggattttacggagtgtccgggggccatgcaatggcgggggatgaaaaaaaatgaaaaggcggcaatgcgccgcctttttagccagccagcagcgattatttgtacaaatcggcgctgatggtgatgttgccgccgcgttcctgccactggcgggtgatgtggtagtacttcgcccctttcttcgccgcgcgtttcgccgtctgataggagatttcggtcatgttgccgtagttgccggtgaactggatgttatcgaacggcaccatttgcgccgcagtcactttgttcacttcttcgaccttagtgccgttcggcagagtgacagtgtaacgtccacctttcgaagactgagtctcaaagaaacgcccaacgccggtacccgaacccaccgcggcggtggtggcaacgcccggaatttcaacgttcttcgccgcttcgccgcctttggccagcgctgcgcggccagcttcagagtcagccgggatagcgtccgggctctgcagcacgcgtttttcagcatcttttttgtagatataagcggtaatgcgctggttgccgccctggttggcgtcaacctggcggacgataaagaacgcataggcgccttttgctttcgccgctttggtgatggcgtcgttgacttccggctggctgcgatagaagccctgaacggtgacggtgtcgtaaggcatcagctcaacggcctgatctttcggcaactccatcacgccgttgataatgcgattcttcggcgcatccgctttcggcgcgtcttctttataaaggtcagccgtgacgcgccagttgccgccattgccgtagtccgacgtgtcgacaacatagaatgaggccgcgccgtctttgtcggctttgcgcgatactgcctgtaccgcatcgccaatggcattaaaccggccggtgacgacaacgcgatcgtagggcttcagcgcagccgcctgctccggggtcaactcggtcgctgcatgggcagacaacgtggcggttgtcaggagagcagacgccaggagggtgtttttaagcttcataaaaataatcctttgccttgcgcaaaccatatactggtgttgttgttgactgaaaacgtttgattattgcatttaatcgccgtgactgtctgcgtcaatttttgcttgccgcccgaatcgtatactacggaaagataacatttttcgatatgttgaaaaaacaggcgcttgaccagcaaaaacgataatcaataccacttttattagttaatgtaatgttaacacaatgatctcaatggcaataaatggcgttttataccgcaggataagcggattatcaggcctgagcggcaaattcaggtaaatattgctgcccggacccatctgagctgacaataagcaataaaatcaaaatttgtgttttatcgcagtagatcacaatcggtattttcagtaggttataaaaagtttgttactgtttcattttgtagacagcgaaagatggcgaggaagattttgccgtcctggcgttgttgggcagaaaagtaaaccatcatcaaaaaccgatggaagggaaaactatgcgtattggtgtaccacaagaaaggctagcccaggagacccgggccgccgccacgccgaagaccgttgagcaattgctcaaactcggctttagcgtcgcggtagaaagcggcgccgggaagctggccagctttgacgatgaggcctttgccgaggcaggagctgaaatcgtgaccggcgacgaggtatggcagtctgatgtcatccttaaggtcaatgctccgaatgacgatgaaattgccctgctgaatccggggaccacgctgattagttttatctggccggcgcaaaacccgcagctgatggaaaaactggcggcccgtaatatcaacgtaatggcgatggattccgtgccgcgtatttcccgcgcccagtcgctggatgcgctcagctcaatggccaacatcgccgggtaccgcgctatcgttgaagcggcgcatgaatttggtcgattctttaccgggcagattacggcggcaggcaaggttccgcccgccaaggtgatggtcattggcgccggggtagccggtctggcggcgattggcgccgccaacagcctgggcgctattgttcgcgccttcgatacccgtccggaagtgaaggagcaggtgcagagtatgggcgccgagttcctcgagctggattttaaagaggaagcgggcagcggcgatggctacgccaaggtgatgtctgaggcctttattaaggctgaaatggcgctgttcgccgcgcaggcgaaagaggtcgatatcattgtcaccacggcgttaatcccgggcaaaccggcgccgaagctgatcacccgcgaaatggtcgactccatgaaatcgggcagcgtggtggtcgatctggcctcgcaaaacggcggcaactgtgagtacaccgtaccgggcgaagtggtgaccaccgccaacggcgtgaaaatcatcggttataccgatcttcctggccgtctgccgacccagtcctcccagctctacggcaccaacctggtgaacctgctgaagctgctgtgcaaagagaaagacggcaatatcgttatcgatttcgatgacgtggtagtgcgcggtgtgaccgttgttcgcgaaggtgaaatcacctggccggcgccgccgattcaggtctccgctcagccgcaggccgcggcgaaaaaagtggaagcgccgaaagaagcggtgaaaccggcgtcgccgtggcgcaaatatgcgctgatggcgctggcgattattctcttcggctggctggccaacgtggcgccaaaagagttcctcggccatttcaccgtcttcgcgctggcctgcgtggtgggttactacgtggtgtggaacgtctcccatgcgctgcatacgccgctgatgtcggtgaccaatgccatttcgggcattatcgtggttggcgcgttgttgcagataggccacggcggctgggtcagcttcctgagctttatcgcggtgctgatcgccagcattaatattttcggtggttttaccgtgactcagcgcatgctgaaaatgtttcgcaaaggataaggggtagcacatgtctggtggattagtaacggctgcatacattgttgctgcaatcctgtttattttcagcctggcgggcctgtcgaaacacgaaacgtcgcagcagggcaactatttcggcatcgccgggatggccattgccctgattgctaccatcctggggccggacgccggcaacgtcggctggattattcttgcgatggtgatcggcggggcgatcggtattcgtctggcgaagaaggtcgagatgaccgagatgccggagctggtggctatcctgcacagcttcgtggggctggcagcggtgctggtgggtttcaacagctacctgcagcatgaaaccggtatggagcaaattctggtcaatattcatttgaccgaagtgttcctcgggatcttcatcggcgcggtgaccttcaccggttcggtggtggcgtttggtaaattgcgcggcaaaatttcctccaggccgctgatgctgcccaatcgccataagctgaacctggcggcgctggtggtttccttcatcctgatggtgatttttgttcgctctgacagcaccggcacccaggtcctgtgcctgctggtgatgaccgcgatcgcgctggcctttggctggcacctggtggcctctatcggcggtgcggacatgccggtggtggtctcgatgctcaactcctactcgggctgggcggcagcggcggcgggctttatgctgagtaatgacctgctgatcgtcaccggcgcgctggtgggctcttccggcgccatcctctcttacattatgtgtaaggcgatgaaccgctcctttatcagcgtgatcgccgggggcttcggcaccgatggttcctccagcggcggcgatgaagaagtgggcgagcatcgcgagattagtgccgaagagacggcggagatgctgaaaaactcgcactcggtgatcatcaccccgggctacggtatggcggtggctcaggcgcagtatccggtagcagaaattaccgagaagctgcgggcgcggggtatcaaagtacgctttggtattcatccggtggccgggcgcctgccggggcatatgaacgtcctgctggcggaagccaaagtgccttacgacatcgtgctggagatggatgagatcaacgacgatttcagcgacaccgacaccgtgctggtgatcggcgccaacgataccgtcaacccggcggcgcaggacgatccgaagagcccgatcgccggcatgccggtgctcgaggtgtggaaagcgcagaatgtggtggtctttaagcgttcaatgaacaccggttacgccggcgtacagaacccgctgttctttaaagagaacactcatatgctgtttggcgatgctaaagccagcgtcgatgcgatcctgaaagcgctgtaatgtaacataattgttttacaacgtttgtttataagccgtctcctgtgagacggcttttttatatgcagggagatacctggaattgttcataaaataagcggcaagaggtgatataatgttccggttcttacatcagacagaggatattatggataccgagttaaccccaacgcagatggccatcgaattcttacgccgcgaccccaccgtcatgaccccagcgcagtatctgaaaaaacttaaactgctggagctggagtttgctgacctgatggcgctctcctcgctggagctgaaagaagagatcgatctggcctggcgtctgggtatccactaagccattctcgctggacagtgacaggggccgccaacggcccttttttgtgcctggctggcagcaagcaaaaaaatcccccgcgaggcgggggaagatgagtggtagcggttaatcgtcgtcgtcgtcgtccagttccaccggcgtctggtaggcctccggtttcagcaccagcaggtcacagcgcaggtggtcgacaacctgttccgcggtattgccgaggaacgccgccgacaggccggtacgtccgaccgttcccagcaccacgatccccgcctgcagatgctcggcgaggtccgggatcacctcttcaggcagtcctttttcgacgtgggtgaatttttcatcgatgccaaacttctgccgcagcgctttcatcgccagcagatgctggccgcgaatggcgtcgttgtagacgctgggatcaaaatccggcagttctatcgcgatattgatcggcgtcaccgggtaggcaccgatcaggtgcacttcagtgtggttgacttcttccgccagcgacagcgtctcgcgaaccagcttctcgttaagggtgttgtgataattctcttcactggcgagattgacggcgaccagcgctttgccgccttccggccacggctggtctttgaccatccacaccgggcaagggcatttacgcagcagatgccagtccgtcggggtaaagatcaccgcctccagtttgtcgtgctggtgggccatcttcagcagcagatcgtgtttctcactgaccacctcctgaataatcgcttcgaagggacggttgtgccacaccactttcacgtcaatcggcacgcccgattccaggtagaatttcgcctgctcgcggatccaggccgttcgttgggcaatgacgccctggcgcattgccgtccgctcgtccggcgacagcagggtggtcatttcataggaaaaatcatagatcggcaaaaaggctttgatgcgtccaccaatccgttggtgcaggtacaccgctcgccttagcgccggctggtcgtcctggttaggatcgattactaccagcatgctctgatacttcgccatacagggtctccttacaactgcagctaccgtcagttattaaaaagataacctatatggatgaattgaaacaggggaggagcctggtcagatcaacaaatctgaaaaaattgccgatcgtgaccaggtattgcgcagagattaagcgacgttgcgcgcctgcccggccagctgggccagcagatcgctgttttcaatagtgatatatttgcctttcaccgccagcatgccgcttttctgaaaacggcccagcagacggctgatggtttcgacggtgaggccgagatagttgccaatatcgccgcgggtcatggtcagccggaactcacgtggtgagaagccgcgctgggcgaaacgacgagaaaggttatagataaacgcggccaggcgctcttcggcattctttttggaaagcaacaggatcatatcctggtcgcctttaatctcaccgctcatcaggcgcatcatctgctgacgcagattgggcatttttccggaaagatcgtcaagggtttcgaaggggatctcgcagaccatcgaggtttccagcgcctgcgcaaagctcgggtgcagaccggtgccgatggcgtcaaagcccaccaggtcgcccgccagatggaagccagtgatctgctcatcaccttgctcggtgatggtatagcttttgatggtcccggagcgaatagcgtacaacgacttcagctcatcaccggctttgaacaaggtttgacctttctggataggctttttccgctcgataatattatccagctgatcaagctcatgctcgttcagagtaaaggggatgcagagctggctaatgctgcaatcctgacaatggattgcacaaccgccagactgaatgcgtcgaataattcgcttctcagggatcatatgtctgctcaggccttaattgatattggtcaattttaacatctttttgatcagcaggtaagtcttcaggcccggaaacacgtaatatcagcagggtaaatcaaatcgcctgcgtatctgtttgattaaaaacagattattacgccacttttgattgtaaaattacctgaaaattccagaaaaggcattttcagtcaaagcaacagatagccctcatgacgcaaaagccactctttacgctgtacgccgccggcatagccggtcatggtgccgttgcgcccgatgacccgatggcagggcaccacgatactcaccggattggcgccattggcggcgcccaccgcgcgcgcggcgccgggacgaccgagcgccttggctagttggccgtagtgcatcacctggccacaggggatatcgcgtaacgcctgccagacctggcgctgaaaaggggtgccggcggtggcggtaggcagagtctcgataatggctaaatcgccggcaaaatagtcgctcagcttactgctgagaccgccgggattgcggcagtcgacgcgctgatagccttcccggcgatagtgtacgtcgagcagcgtttccatccgatcgcggtgctcgtcccactcgacggcgcgcaaattaaactgttcgtcgcaaagcacccacaacggccccagcggggtatccattttatcctgcagcaaggtcaacatcgtttctgtcatccaccatcgtacatgagaggcacacgataccacgcgctgacggcagtcaactatactcccaaaaggtaaaaccgcatcgccagatagcacggcgggctatccgccgtggaggtattctgcgatcgccacgatgatttatttttggatcgatcctggcgggttaccggacagggtttttgctacttttaagctgacgacgtcggtcctccgcgccgctgtgcgcgctcgggaaagtgctaccgcgtcggcgcggcgcggttaataactcagaggtggagctatgcaatatatactgactggcgtaatcgtactgatcttcagcggtctggttattcacggtatgtcgctgttgcttgagcgagggtatcgcgcgcttttcggcatattcgccggagccggggaagcgacccgtaagttcaaagtgaagatatcgcgttaagctaaggcggccgtccctggcgcatcggtgggttaagacagccgcggatagatgccagggccgatcggcagtcccaccagataccagcccaccagcaacagcagccagacggcgagaaaaatcagcgggtaagggagcaccagcgagtagtaggtgccgaggcgggcatccggccggtagcgctgtagaaagccgagaaacaacggcacaaacggtgacaccggcgccagcggcagcaccgatgaatcagcgatacgaaacaggatctgcgcaaacgccgggtgaaagcccaacagcataaacattggcacgaagatcggcgccagaatcgaccagatggccgagccgctggcgataaacatacacagaaaagccgacagcagcgcaagaccgacaaacgccggaacaccgttcatgcctgaactctccagcagatccgtcagcccgacggccataaacttgcccatgttgctccagttgaacatcgccacgaactgcgccagcgggaagaccatcacgataaacccggccatctctttcatcggctcaatcatcaactgcggcaggtcggcctggcggcgaattttgccggtggcgatgccgtatgccagcgacacgacaaagaagaaaaagataattagcggcacgatgcctttgataaacggcgagggcatgaccgtatgctgaaccggatcgcgaagaataccgttttcggggaccaccatcagggcgatgaccgccacgaataccagcgtcgccacgccggcgatgcgcaggccgaaccgctccgcgggcgtcagcgtctgcagcttttcatcacgactgccttgccactggcccagccgcggctcgaccagcttatcggtgatcagtccgccgacgagcgtcagaacgatcaccgaggtcgccataaagtaccagttgtcgatcacactgacgtgcaaagaggcatcgatggactttgccgcctcggtgctgatcccggagagcagcacgtcggtggtgacaatcagtagattggcggtaaagccgcagcccacgccggctatcgccgccagcagaccagcgacaggatgccgaccgacggcaagaaacatcagcgctcccagcggcggcataatcaccagcgccgcatcggaagagatatggctgaaaaaggcgataaacagcaccatatagctggcatagcgggcgctgacgtgcgaggccatcttgaccatcaacgccggtaacaggcccacccgctcggcaaagccggcgcccagcaccagggcgaggatcgcacccagcggcgcgaaaccgctgaagtttttaatcacgttcggcaaaaaccagtgcaatccttccacgctgagcaggtttttgaccaccacccgcgaaccgtcagttgggttttgtaccccaacgttgagggcggagaggattgccgtggcagcgatcagcacggcgatgagatagataaacagcaaaaacgggtgcgggaccttgttaccgatcttctctacccagccatagcgctttccgccgggggaagatgacggtatggatgacatactcatgggcattcctctgttgtcgttgttgtgttgggcaggcctgctcccgtactgccggcggttattatgggcggtgcgtgccgcgatccggtcagcgttggccaggagtagcctctaagtggttatcgtaaaacggacggactcacctccgccgggatcgggcaacgataggggcgttcggccagtacctgcctgagctcttgctggctggcctccagcagggcgctgtcgctgaataaacggatggcggtcgccgcgaggactttccccgccagcaacatccctttatgggcaatggaggttctgccttggctcaccagctgccagctgtgcagcggggtacccaccgcgaagcacgggctgaagcactgggccaccggcgctttccagctaacatcgccgacgtcggtggatccggcgaggacgttatccgtggccgcccagggcgccacctcatcaatcagcaaggtgtcgcggtggcgacgagcgaacgttttgccttcctcgccactggtgccggcaatattgttcaggctgttgttaatatcgttggcgctgagggtggcgcggatcgccgcggcaaaagcgcgttcctcgtcgctccaggcgggggtaccgtaatgacagaccgcctgatacatcgccgcctcaagcgtgcggttgggcagatagctggagcaggctttttcaaagcggcagctgacctgggtctcggtcatcagcgcggccccctgggcaatcttctctatgcgggcgaagatttgctcagcgtcggccatctccggcgcgcggatcaaatacagcacttccgcctgcgcctgcaccacgttgggcgagacgccgccggtatcggtaatggcgtaatggacgcgcgccttctcgatgatatgttcattgaggaaattgctgccggtggtcatcagggtgacggcatccagcgcgctccggcccaggtgcggcgaattagcggcgtgggccgcggtgccggtaaatcgccatgccgcctgaatgttggcgagggtgcgggtgctgaacatcccggcccaggcttccggatgccaggtcagcgccgcatcgacatcatcaaacaacccttcgcgcaccataaaggtttttcccgaaccgccttcctcgccgggacaaccgtagaagcgcagagtgccgctgtcgccgtgctgctgcagccagcctttggcggcgaccgccgcggcgaatgccgcggtgccgagcagattgtgcccacagccgtggccgttggctcccggtgtcaagggcgtcggttccgcgctgtgggcctgctggctgagtcccgccagggcgtcaaattcgccgagcagggcaatgaccggttggccctcaccgacgctggcgataaaggcattcgggatcccgccggcatcgcgagtgagctgaaaaccttccgcctccagggcgtcggccagccgttgggctgaccagaactcctcaaagcgggtctccgggtggtcccagatgtcgtcggcgatggcgcagtaagtgtcgcgttgtgcctcaaccacctcgtccacaaactgaaaaatggcttccattacaccccccgctgccagggaaagttaagcgcgacgcgcgccagggtttcgaccgctaccgccatcacgctctcgtcgaagtcaaacttttcgttgtggtgaccggcgctgagttcagtgccgaaaatcatgtacgaggcgaggccgccgcgcgcctggacccgggccatcatcagggtggcgtcttccgagcccgccggggcggcgatgcgatccaccgcctgttgcacgccgggcacccgggcggcctgttcgcgcagatagtccacccacgccggcgacggtgcgctggcggtcgccgcgcccatcatgcgcagttcgtagcgggcttcgtacatcgccgcagccccggcgacgacgtgctgcgcccgctcgaacacgtactgattaatggcttcgctttcgccgcgggtttccacttttaacagcgcggaagagggcaccacgttgcgcccggtaccggcctgcatcaccccgacgttgacccgtgaggcgccggcgctgtgcggcgggatggcgtgcaggccaagggcggcctgggcggcggccagcagcgcgttgcgcccgtcctcgggcttgccgccggcgtgggcagccacgccgctgaactgcacgtcgaatttggtggtggccataaagttgtctccaccgcagacgacggtacctgccgggacgccggtcccgatatggatcgccgtgaaataatccacgtcatcaaccacgccggcggccaccatcgcgcgggcgccgcgggtaccctcttcagcaggctggaaaatcagtttaatgacgccattgagctgggcggcatactgcttgagcacatgcgccagccccagcccgatggcggtatggccgtcatggccgcaggcgtgcatcatgccggcgttgcaggaggcgaaatgatcgcgatgggggcggtggctatcgtcatgctgttcgttgagatcgagggcatccatatcgacgcgaaaggccagggttggtccgggccgcccggtgtcgagcgtggccaccacgccggcgaaaccgccttcaaacgccggcagccagcgctccggcgcgccctgttcgcgggcgcgttcgaaagcccgggccagggtctcctcgtccggcagccccatccggctgtcggcatcgatgacgtcgcggcctagcgccagctgatagcctagcccgtcaagaatatccgcgaccttactggcggtgcgaaactccagccagccggattcagcgtgcaggtgaaaatcgcggcgccattgggtcatggagggcgccagctggcggaggtattcatcaagttgcggcatagcttatcctgtcataagtaaaaaatgtgacggcgttcacgatgtgatagcttttgtttatcactgacgcgctacaggccttaacacccttaacctgccacagcctgatggattacagtagatgtcattttcttctgtctgataagcaacggttatcactaaaagcatggcatttcagattaaatttcatcaaattcgcgccttcgtcgaagtagcccgggaaggcagtatccgtggcgccagccgggcgctggcggtctcgcagccggcgctgaccaaagcgattaaagagctggaggaggggctttccgcccagctgttcgtccgccgcagccagggggtggcgttaaccgacaatggcgaaagtttttatcaacatgcgagcctgatccttgaggagctgcgggcggcgcaggatgaactgctgcagcgccagggggaacaggccgggcaaattaatattggccttggcgccagcgtcgcccggtcgctgatgccgtcggtgatctgccgctttcatcagcagcatccgcaggtgaaggtgcggatcatggagggtcagctgctggcgatgattaatgagctgcgccagggggagctggatttcaccattaatacctattaccccgggccgtacgaccatgagttcagctttgagaaactgtttgagaaaccgttcgcggtgttcgcccgcgcgggccatccggcggcgcaggccacctcgctgggggagttgatggatcaccactggaccatgccgacgccgcgcggcagctacttcaagcagctgcaggagcgcttcgaacagctgggacgggagccaaaggtggggatcgtctgcgaaacgttctcatcctgcatcagcctggtggtgaaaagtgattttctcagcatcctgccggtggagctgggcaacgacccgctgatggccgacaaactggtgatgatccccatccgtgaagtgttacccaccgccacctattatctgatccagcggcgcgatacccggcaaacgccgctcacggcgtcgttaatcaccctgttccgccgccagagccgacaattgtttccttaatcgtccgtcgcgctcactttgccagcgaacgcggctaaacgcgttgagaggggagcgcgaggcggctatagtagctggcgacagccgctggaggagagcccatgaaccttgatgacaaatccctgtttcttgacgccatggaagatgtccagcctctgaaacgtaacaatgacgtgcactggcatcccgggcgtaacagccgggccccgcaacgcgtcgataccctgcagctggataattttctcaccaccggctatctcgatatcgtgccgctcgccacgccgctggagtttaagcgagaagggctgcagagcggcgtgctggataagctgcggcgggggaaatacagccagcaggcgagcctctccctgctgcgccagccggtggaacagtgccggcagatgctcttcgcctttatggtacaggcgcagaaagaggggttacgcaatgtgctgatcgttcacggcaaaggccgcgacgaccagtcccacgccaatattatccgcagctatctggcgcgttggctggaagagctgccggaggtgcaggccttctgcgccgcgcttccgcatcatggcggcagcggcgcctgctatgttgcgctgcgtaaatcggcgcaggcgaagcaggagacctgggagcagcacgccaagcgcagtcgttagcgcagaagcagcgtcagctcgcgggcggctttttgcagctccggcagcacgcgctcgatcatctcgcgggccgtcatctggcccgcatgcaccccgacgttgagcgccgcctggacctgcccctgagcgttaaacagcgggaccgcgagggagcgcagccccatctccagctcctgatcgttgagggcatacccctgctgatgcacccgtttcagttcggcgcgcagcttcgccaccgaatccaccgtctgtggggtatagcggatcatggtcacccgggccagcatatcgttgagcttctcctccggctgatggctcagcagcacccggcccatcgaggtcgcccacgccggaaggcgactgccgatatccaggtcgatggtcataatccgcgagctggaggcgcgggcgatatacaggatatcgtcgccgtcgagggtggcgatggagcaggactcattgagcatttcgctcagatgccgcagcaccggctgcgccgaacgcgccagcggcgtcgaggccagccaggcgtggcccagcgccaggatccgcggccgcagctggaaattcttaccgtcttcggcatacacgaaccccagcttgctcagggtatacaggcagcggcgcaccgcggcgcgcgggatgccggtcttctgactgatctgtgagatagacagcaggggccgctgcggcgtgaacgcctgaatcacctccagaccccgcgccagggaggccataaagttaggatcgcctttaaacggatcgccgtcgccggtcagtaaatcgtctggatgcttgtccatttctgttccccatatttgccatcgatcacattctttcgctaaagataaccgatgttcgattatcgcaccatatttcgattatcgcccttgaccgacatcgttaagcgggtcacattttgtgcgaacaacgaataaaagtgcgattaccgcacatcactggagcgacctgatgattgataaaagcgtatcgacgctgagcgaggccatcgccgggatccacgatggggcgactattatgatcggcggctttggccccgccggccagccgacctttctgattgacgccctgattgaccagggcgctcgcgacctgaccatcataaataacaacgccggcaacggggaagtgggtctcgcggcgctgctcaaggcgggccgggtgcgcaaaatgatctgctcctttccgcgccaggtggattctcagattttcgatgatctctaccgtcgcggcaaagtggaactggagctggtgccgcagggcaacctcgcggcgcggatccaggcggctggcgccgggctgggggcggtatttacccccaccggctacggcacgccgctggcggaaggcaaggagacacgggaaatcgacggtcgccactacgtgctggagtacccgatcaaagccgatttcgcgctgattaaagctcaccagggcgaccgctggggcaacctggtctatcgcaaggcggcgcgcaactttggcccgatcatggcgacagcggcgaaaaccaccatcgtagaggtctcgcagctggtggcgctgggcgacctcgacccggaaaacatcatcacccccggcattttcgtccagcgcgtcttctcgctggaaaacctgactgccgcacaacgcgcctgaggagcccgacatgcaaaaactgacccgtgacgaaatggcccagcgcgtggcccgcgatattcccgaaggcgcttacgtcaacctcggcatcggcctgccgacccgcatcgccaattacctgcccgctgacaaagaggtgttcctgcacagcgaaaacggcctgctggggatggggccgaaaccgcagcccggggaagaagatcccgagctgatcaatgccggtaaagagtatgtcaccctcctgcaggggggctgctatttccaccacggcgactccttcgccatgatgcgcggcggccatctcgatatctgcgtgctgggggcctatcaggtctccgccagcggcgacctcgccaactggagcaccggtgcgccggatgcgatcccggccgttggcggggcgatggatctggccatcggcgcccgccaggtgtttgtgatgatggaccacctgacccgtgacggcgagtgcaagctggtggcgcagtgcagctacccgctgaccggcgtcggctgcgtcagccggatctataccgacctggcggtgatcgacatcaccgaccgcggcccggtggtgcgggaaatctttaacggcctctcttttgaagagctgcagcgcatcactccggtggcgctgacctttcaacaactggcggaaagcgcgtaaggaacctatgatgaatcaggcatttatctgtgatgcggtgcgtacaccctttggccgtttcggcggtgccctggcgacgatgcgcgctgacgacctggcggcgctgccgctgaaagcgctgctggcgcggaacccgggactggatccctcgcgcattgacgatgtgatctttggctgcgccaaccaggccggggaagacaaccgcaacgtggcgcgaatggcgctgctgctggccggcctaccggagagcgtgcccgggagcaccatcaaccgcctgtgcggttccagccttgacgcgatcggcgtcgcggcgcgggcgattaaaagcggggagacgcagctgatgatcgccggcggggtggagagcatgtcccgcgcgccgtttgtgatggggaaagcggagagcgcctttagccgcagcatgcagatggaggataccaccatcggctggcgctttattaacccgcagatgaaagccctgtacggcgtgcattccatgccggagacggcggaaaacgtcgccgatgagtttgccatctcccgtgccgatcaggacgcgttcgccttacgcagtcagttgcgcaccgccgcggcgcaagaggcggggcgtttcgccgatgagctgatcgccgtccaggtgccgcagcgcaaaggcgagccgctgctgtttagccgcgatgagcacccgcgcagcacctcgctggaggcgctggctaaactgcgcggcgtggtgcgcgccgacggcagcgttaccgccggtaacgcctccggggttaacgacggtgcctgcgcgctgttgctggccagcgagacggcgctgtcggctaacgatcttcagccgctggcccgggtggtcggcgtggcgacagcgggcgttgcgccgcggatcatgggctttggcccggcgccggcggtgcgcaaggtgctggcgcagaccggcctgacattaggccagatggatgtcattgagctgaatgaagccttcgccgcgcaggcgctggcggtgacccgcgatttgggcttaccggacgatgccgcccacgtgaaccctaacggcggggcgattgcgctgggccacccgctcggcgcctccggcggccggctggcgatgaccgcggcttatcagctgaaacggaccggcggccgctatgccctgtgcaccatgtgcatcggcgtcggacaggggatcgccctgattattgaacgcgtttaaggagccagaatgagtttgttgaccccgatgctgcgcagcagtccgctaaccgactggttcagcgacgcgcagcgggtgcagggcatgctggattttgaagcggcgctggcgcaagcgcaggccgcctgcgggatggtgccgccggaagcggtcgggccaattgtcgcggcctgccgccacgaggccatcgattttgccgcgctgggcgaggcagcggtgggagccggtaacctggcgatcccgctagtgaaacagctgacggcgcaggtaaaagcgcaagatcccgaggctgcgcgctacgttcactggggcgctaccagccaggacgccatcgacaccggactggtgctccagctgcgcggggcgctggatgccgctgagaccctgcttgagcagctgttggcgaccctggctcttcaggcggatcgttatcgcgataccgtgatgccgggccggacctggatgcagcacgcgctgccggtgacctttggcctgaagctggcgggcaccctcgacgcgctcctgcgctggcagcagcggctgcgcgagatgcgtccgcgactgctggcgctgcagttcggcggcgccgcgggcactctggacgcgctaaaagagaaagggccggcggttggcctggcgctggcgcagatcctcggtctgtcgctgccggatactccgtggcacagccagcgcgatcggctgctggaggcgggcgcctggttcgccggcgtctgcggcacgctggggaaattcgctaacgatttctccctgctgatgcagaccgaagtggctgaggtcggcgagccggtggcggaaggccgcggcggctcgtcgacgatgccgcataagcgcaatccggtggcctgcgcggcgatcctgaccgccgcccagcgtacgccggggctgatggcgacgctctacgccagccaactccagcagcatgagcgggcgctgggcggctggcaggcggagtgggagaccctgccggagctaattaccctggtgggcggggcgttggcgcaaagcgaggcgctggtgcgcgacatgcaggttttcccgcagaaaatgcgcgccgatctcgatatcacccacgggctgattatggctgaggcggtgactctggcgctggcggaattcattggcaaagccgaggcgcatcatcacatcgaagcgctgtgccgccaggcgctggaccgtcactgcccgctggtcgatctgctcgcggctgacccacaggtcagtcagtatctctctcgtgaacgcttaaccacgctgctggacccggcaacggcgaccggcagcgccgaacgctttgtgcgccaggtgctggcgcgttatcaggagcaacgtgatgaatcttgattatcaactcgacgggccggatggcgcgccggttatcgtcctctccaattcgctgggcaccacccgggcgatgtggcagccgcagatcgaggcgttaaccgcccatttccgggtgctgcgctacgacacgcacggccacggtaaaacgacgaaaaatggcaaagtgaccctcgcccagttgggtgaggatgtgattgcgctgctcgatcacctgaatatcgaccgcgcctggttctgcgggatctcgatgggcggtttgaccggcctgtggctgggccgctttgcgccggagcgttttcatggtctggcggtcgccaacaccgcggcgcgcattggcgatcaggccagctggctgtcgcgggcgcgggccgtacgtcaggaggggatggcggtggtggccaccggagcggcagaccgctggttcacccacgcgtttcgccagaaggcgccggaggtggtcgaggcgctttgtcaccagctgacccataccgatgctgaaggctatgccgcctgctgtgaggcgctggccgccgccgacctgcggggcgaagtggggcagatcccgctgccgacgctaatcatcgccggggaaagtgaccctgtcaccacggtcggtgacgctcatttcctgcagcagcagatccccgcctccgaggtggtggttctggcggcatcgcatctgtctaacattgaggcgccgaaaagctttacttcggcgctgctgagctttttccagggggaacgccatggatgataaacagcgctatcaggacgggatggcggtacggcgcaaagtattgggcgacgcccacgtcgaccgtacgctgcagcatctgacgccgttgaatgatgagtttcaggactttattacccgctatgcctggggcgagacctggacgcgtccggggctcgatcaccatacccgcagcatgatcactattgccatgctgatcgctctcaatcgcgaggcggagctgaagatgcatctgcgcgcgtcgtttaacaacggggtgacccgcgatgagctgaaagagctgatcatgcactctgcgctgtactgcgggctgccggcggccaatgccacgatgcatctggcgcagcaggtgtttgacgacatcgacgccgcgcagggttgaatcgtcgtccgagtcggattgcccggcagtcgttgtaggccgggtacggcgcagccgccacccggcgaaatggcgggtacggcgcagatagattgccctccggcgcagcgcttgccgggcctgggaagcgaagatcgcctgtagaccccgtaggccgggtaaggcgcagccgccacccggcgaaatggcggcacaaccggaaatgtccctgttcgcactatgtttggcaggactacaacgtttggcagggctacaacttctatgttaattccgggcagattgcgctcccggttgatcttctgcgttatgtctcgtatggcacagggggcggccagtcgccgccgccccctgtacccccgggctccggccagcaaaatcgccgctgcgcggtcccttcgacttatccctgcaggctgcgggtcgggccgaggcagcgtccctgcaaaacacggccctcagcccgcattcatgcgggctgccccggccttccgggaacgtctcagcgattttgaggccgccagcaccggcagtttcagtcgcgcaagtgggtaaatgagtgacaggccgcacgaaccccgtaggccgggtaaggcgcagccgccacccggcgaaatggcggcacaaccggaaatgtccctgttcgcactatgtttggcaggaccacaacgtttggcagggctacaacttctatgttaattccgggcagattgcgctcccggttgatcttctgcgttatgtctcgtatggcgcagggagcgcacagggggcggccagtcgccgccgccccctgtacccccgggctccggccagcaaaatcgccgctgcgcggtcccttcgacttatccctgcaggctgcgggtcgggccgaggcagcgtccctgcaaaacacagccctcagcccgcatccatgcgggctgccccggccttccgggaacgtctcagcgattttgaggccgccagcaccggcagtttcagtcgcgcaagtgggtaaatgagtgacaggccgcacgaacccctggccgggtaaggcgtagccgccacccggcgaaatggcggcacaaccggaaatgtccctgttcgcactatgtttggcaggaccacaacgtttggcagggctacaacttctatgttaattccgggcagattgcgctcccggttgatcttctgcgttatgtctcgtatggcgcagggagcgcacagggggcggccagtcgccgccgccccctgtacccccgggctccggccagcaaaatcgccgctgcgcggtaccttcgacttatcccttcaggctgcgggtcgggccgaggcagcgtccctgcaaaacacggccctcagcccgcatccatgcgggctgccccggccttccgggaacgtctcagcgattttgaggccgccagcaccggcagtttcagtcgcgcaagtgggtaaatgagtgacaggccgcacgaacccctggccgggtaaggcgcagccgccacccggcagaaatgccgctacgttaacctttatttctccggctcctgcggcgcgacggccggggcggcgtaccaggcttcctgcggcaccactaccgccgcctttggctgcatcacaaagttcggcgacataatctgcacgccgaattcgttaaacacatcaataatgctgctatgcaatgcgttgcggccatccggcagcttggttgtggggagtaagcgcacctgcagctcatacgaggtataccagtcgagcaatcccagcttacgcaccaccggggcaatttgctgatcgatccccggggtgcgtctcgccgccagctccagcagcgcatggacctgacgccacggcgtatcgtagccgatggtgacgctggtggtgaggttgactccaccgtcggcgctttcggcgctgagattaataattttcccgctcaccaccaccgcgttcgggacggtaacgatgtaattttcgcgggtgagaattttggtcgccagcacgccaatctcgctgacctgaccctcattatcggcgaggcggatccagtcgcctttgcgcagcgcccgaaggtagatcagcaccaggccgctcatcgcatgggtcatcaccccggttgacccgagggtgagcatcaggccgaagaacaggctaatgcctttgaaggcgagggagttggcgccgggaaggaacgggtaggcggcggagagggcaaacaaccagatgaccaccgagataagccgacgggtggcgctaacggtctccggatgaatgccgggaacctgaatgcggccggcggcgacctggtcgagaaccaccttcaccaggcgaatgataagccaggtgagaaggaaaataagcaccacgatcatcagccccggcagggaggcgacaatcgacagagagaggtcgcggatcacccccagcgaccagtcccccagcgattcgctccacacccgcgtccagggaaacaggctgaaggcccagctcagccagagataacaggccagcatgccgagaaggatgaccagcacagcatagagtcgaacttcaatattgccgagatagcgccgccagtgctgcggtatggcgctacgtttttcgaggatccgcagcaggaaaaagcgtcgcacccgccgccaggcgcggaaggcgccgtagtaaaacagcgccagcagcagcgccccggccagggctttaccggcggagatgaacagatagcggttgttgaactgctcctggaggctggtgcgctgggcttccatacgcgccagcacccgctgggctgcctggtcgagggtttaatcatcgccctcgtcgagatccgcctggctcagcagcagcaccggtttgccgttcatcagaaacagtctgcctggctgaccatagcggataaccggcacgacccgcagcggctggcgaatatcatcttcggtgaaggcgcgcagggcgctacgggtgcgcaaaacgcgctcttcgggcgtggtctggccaaaggtgacctgcaacatgacgacaggttggtggaaaatcgtgaccgtgcgtgcctgctcgcgcgcggttggctgctgtcgcggttcggcggccagcgccggctggagcaccagcagcgccagcgcccagaggataacgatgctcatcctgttcattgaggcacctgagataagaattattgttatttttcagcaaaaaacggagggcttgtagttgagcatagcctggtgcgaagtgaattcaagctgggtaaacgcggacataaaaaaagccgtcgcccaaacggcgacggcctgatatcagcgtcagaggatagcgttagccgtgctgtttacagcccgcgcactgcttattctggatctgctggaagaagtcgttgcctttatcatcgacgaggataaacgccggaaaatcttccacttcgattttccagatagcttccatccccagttccggataggccacgcactcgaggctcttgatactctgctgggcgagcactgccgccgggccgccgatgcttccaaggtagaagccgccgtgtttatggcaggcatcggtcacctgctggctgcggttgcctttcgccagcatcaccatgctcgcgccgtgggactgcagcagatcaacgtaagagtccatgcggccggcagtggttgggccgagggagccggaagcgtaaccggctggcgtttttgccgggcccgcgtagtagatcgggtgatctttgacgtactgcggcagcgcctcgccgttgtcgataagctccttcagcttggcgtgggcgatgtcgcgggccacgataatggtgccgttaaggctcaggcgggtggagaccggatgtgccgacagctgcgccaggatctcgctcatcggctgattcaggttgatgcttaccacttcgccttcgccggcctgacgcagatgttcaggaatatattttcccggattgctctccagcttctcgatccagataccgtcgcggttaattttggctttgatattgcggtcggcggagcaggagacacccatgccgatcggacaggaggcgccgtggcgcggcaggcggatcacccggatatcgtgggcgaagtatttcccgccgaactgcgcgccgaggccgaggttctgcgcttcctgcagcaactcctgctccagttgcacgtcgcggaacgcctgaccgtgttcgttaccttcggtcggcagaccgtcgtaatagcgggtcgaggccagtttcacggtcttcagcgtcgcttccgccgaggtgccgccgatcacaaacgcgatgtggtacggcgggcaggcggcggtgccgagagtgcgcatcttctcaacgaggtagtttttcagcttcgccggggtgatcagggccttggtctcctggtacagataggttttgttggcggaaccgccgcctttcgccatgcacaggaacttatattcttcaccgtcgacgctgtagagatcgatctgcgccggcaggttggtgccggtgttaacctctttatacatatccagcggcgcgttctgtgagtagcgcaggttatcttcggtataggtgttgtacaccccctgcgccagggcggcttcatcgccgccgccggtccagacgcgctggccttttttccccatgataatcgcggtgccggtatcctggcaggtcggcagcacgcccttggcggcaatttccgagttgcgcaggaactgcagggcgacatatttatcgttatcgctggcttccgggtcgagcaaaatcgaggcgacctgttgctgatgggagacgcgcagcataaaggcggcgtcgtggaaggcctgctgagcgagcagggtcagcgcctgcggctctactttcaggacctgctggccgtcaaattcggcgacggagacgtgctctttgctgagcagatagtattccgtatcgtcgtgcgccagcggaaacggatcctgataaacaaacggtttagtcgacatagtcacttactccataaagataaaaaccgccggggtagtcccggcggttatgaatcagaacatcatggacatccacggatagccaatcagcagcagggcggccaggaagatggcgccaaagatggtgccgaggcgccagtaatctttggtcggcaggtagccgctgccgtagtagattgggcttgggccagtaccgtacggggtgatgatccccatcacgcccagcgaggtgaccatcagcaggacaaacacttccatattcattcccgggatagtcgaggcaatggtcagcatggccggcagcagcgcggtggtgtgcgcggtggtgctggcaaacaaatagtgcagcaggtagaacgccagcagcaggacgatggtcgccatccccggggagatgccgctcatcagcgcgccgccctctttacccagccaggcgataaagccggtggaggagaggccgtcggccagtgccaccagggtggcgaaccagacaaaggtgttccatgccgctttgttgttggtgatatcgctccaggagagcacgccggtccacagcatcagcacgataaccagcagggcagccagcgccggttcgatccagtcggcggcgaagatccacatcatcagcgcgaagcagacgaataccagcagcagaatttcattgcgcgacagtttgcccagtttttccagttcacgcgcggcccacagtggcacttcgttattgactttcacttccggcgggtagaaccagtaggccagcagcggcatggccagaatcagcaggatacccagcggcaggaaggcgatgaaccaggtgccccaggagatattgatgccaacaatgcttttgaccagcgccagggccagcaggttcggggccaaagccgacaggaacatcgagctggtaatacaggcggcggtgatcgctacccacatcagataggaaccgattttacgtgcgctcggatcgtttggctttgaaccgtacagcggcggcaggttagcgataatcgggtagatagtccccccgctgcgtgcggtgttagatggcgtaaacggcgccagcagcagatccgcgaaggtgatggcgtagccgagcgtcaggctgcgacggccaagatatttcaccagaatcagcgccaggcggcggccgaactgcgttttatcgtagccggcggcgaacatgaacgcgccgaagataagccacacggtggagttgccgaagccgctcaccgcccacttaaaggaggcgccagccattttgaagcctggcgcggccatctgatccgggctgaacagcagccactggctgcacagggcaataactaccacgccggtgataccgataacggcgccgggcagcggttcaaaaatcaacccgacgatcaccccgacaaagatagcgaagtagtgccaggcgtacggcggcaggccttcggggaccgggacgaacaataacagcacggcaacgataatcggcagcgccatcatcaggagaggttttttattcgcagtcgttggcttgactgcaccggcaggcggtatggttgtctttttctctttcataatgagtatctgcaagttgttgaaaataacgtttacgccagcgtcttgctcagtggtttctttaattacaaaagttactttagtttttattttgcgtttctgagtatcgacagggcgcttatttaacgcgttttatgaggcgttaaattaaatttgttggttatttatatattgcgctttcaatggccgttgcaattgatcaagatcaagaaaagccggtgatttcactatttttttattatcagtataaccctatgtgatgaggtgttattttggtgaaaatatcgatagatgttaaaagaaaaatgaacaataaatgctgaaattatattccattttagtatctttatgattttattgtatttttgtggtttttcttgtcattgtttatgttaacaaaagtatcctaattgttatcacgcatttgtattatgtaaatgctatttattattttaataatacaatagaggtagcgatgttattgctggggttaaatagttttataactaacgtaattggtttagtaattaaaaaacgcgctatattattggcatgacaacaggaattaaaaaaccaaaaccattaatgattccgtcacctcattctgagcttttaatattttaaaatctggagcgtaacttatgaccagtaacgaacgtattttgcagccatttactttaccaaatggtaccgagctgaaaaaccgtttgctcatggcgccaatgaccacctgcaccggttatttcgatggtactgtcaccagcgagctggtggagtactaccgcgcgcgcgccggaagcatcggtaccattattgtcgagtgctgctttattgatgactacggtctggccttcccgggcgcgatcggcattgataatgatgaaaaaattgccggcctggcgaaaatcgctgaggcgatcaaagccgagggttcaaaagcgattctgcagatctaccacggcggccgtatggtcgacccgcagctgatcggggggcgccagccggtggcgccgagcgctattgccgcgccgcgtgagggcgccgccatgccgcgggcgctgagcggagaagaagtggaagggatgatcgccaagtttggcgacggcgttcgtcgcgccattctcgccggtttcgacggggtcgaaattcacggcgccaacacctatctcattcagcagttctattcgccgaactccaaccagcgcgatgacgagtggggcggtagccgcgacaaccgcgcccgtttcccactggcggtgctggatattacccacaaaatggcccgccagtacgccgacgatgcctttatcatcggctatcgcttctcgccggaggagatggaggtcccggggatccgctttgacgacaccatgtatctgctggaaaagctggccgcccgcggtgtcgattatctgcacttctcggtgggtgccaccctgcgtccgtctatcgtcgataccagcgatgcgacgccgctgatcgagaaatactgcgcgatgcgctctgacaccctcgcccaggtgccggtgatgggcgtcggcggggtggtgaacgccgctgatgccgagcagggcctcgatcatggttatgacctgatcgccgtgggccgcgcctgcatcgcctatccggactgggcgtcacgtatcgccgccggcgaagagctggagctgtttatcgacagcacccagcgtgaagcgctgcacattccggaaccgctatggcgtttctcgctggtggaagcgatgatccgcgacatgagcatgggcgacgccaaatttaaaccggggatgtttgttgagaccgtccacgatgacgccaatgagctggtgatcaacgtcagcctcgaaaatgaccatattgccgatatcgaactggcggcgagcccggtccagactgtggaattcaccaccagcttcgaagagatccgcgaacgtattctcaccgccaataccccgcacgtcgatgccatttccggggccaccagccagagcgaggcggtgaaaaaagcggtcgccaaagcgatgctgaaatcgagtaaagcgctggcggcggaagagggcggcaatgacgccgcgccgaaaagctatgatgtggtggtagtcggcagcggcggcgccggtctggcggcagccattcaggcacacgacgaaggggccagcgtgctgatcgttgaaaaaatgccaaccatcggcgggaacaccatcaaggcttccgccgggatgaacgccgcggaaacccgcttccagcgcgtgaaaggtatcgaagacagtaaggagttgttctatcaggaaaccctgaagggcggccacaacaaaaacaacccgcagctgctgcgccgtttcgttgaaaacgcgccgcaagccattgagtggctggcggaccggggcattatgctcaacgacattaccaccaccggtgggatgagcattgaccgtacccaccgtccgcgcgacgggtcagcggttggcggctatctgattagcggcctggtgcgcaacatcaccaaacgcggtattgacgtcctgctggatacctcggtggaagagatcctgatgcgcggggatgaggttagcggtgtacgtctgatcaacgacgaaaaagaggtcattgaagtacagaccaaaagcatcgtagtggccaccggcggcttcagcgctaacagcgcgatggtcgtgaagtatcgtcctgaccttgaaggcttcgtcaccactaaccacaaaggggctaccgggagcggtatcgcgttgctggaacgcatcggcgccggcaccgtggacatgggcgaaattcagattcacccgaccgtcgagcagcagacctcgtatctgatttccgaatcgattcgcggcggcggcgctattctcgtaaaccagcaggggaaccgcttcttcaacgagatggagacccgcgataaagtctcggcggcgattatcgctctgccggaacactatgcttgcatcgtcttcgacgagcatgtgcgggcgaaaaacaaagctgccgacgagtacatcgccaaaggcttcgtcaccagcgccagctcaccgcgggaactggcggagaaactggggatggattaccatgccttcctcgccaccctcgagtgctataacggggcggtggaaaaacagcatgatgaacagtttggccggaccaccgcgctacgcgcgccgattaacgaaggcccgttccacgccattcgcatcgcccccggcgtgcaccacaccatgggcggcgtgaccattaataccgatggcgaagtgctgaatgtggcgcagcagccgatttgcggcgcctacgccgccggtgaagtggtgggcgggatccacggcggcaaccgtatcggcggtaacgcggtggcggatatcatcatcttcggtaccctcgcgggccatcaggcggcgaaacgtgccagaggataacctgtaaccttgctcctgccgggttggcgctttcaccgcccggcttgccccttctaaggagagcccgatgtccgataaccgcgtctatagctactccgccgtgttgatgggctcgcccatcctgctcaaactctgttcccacgatgaggcgatggcctcccgcgttttccagcttatcaagcgctacgaagacctgcttaccgttaaccgcgccgagtcgcaggtgatggatatcaaccatgccgccgggcgtcatccggtcaccgtcagccgaccggtctttcagctgatccagtgcgccaaagccgccagcatggtgcgcgacagcgcctttaacctcgccatcggcccgctggtgaagctgtggcgaattggttttcacgggcacagcgtgcctgacgcggctgagatcagagcccgactggcgctgacccgcccacaggaggtgatccttgatgaggcaacctgcagcgtgtttctccaacagccggggatggagctggatctcggggcgatcgccaaaggctatatcgctgaccgcgtgcgcgattttctccgtcagcagcaggtggagaaggcgctgatcaacctcggcggcaatgtgcataccctcggcgaatgggccattggcctgaaaaaaccatttgccgacgcgcaggcgctgatcggttccctgacggtcaacgggcaatcggtagtcacctccgggacctacgagcgctatttcgaacaggatggcaaacgctggcaccatattctcgacccgcgcagcggttatccgctggacaacgaactcgacagcgtgacggtcatttccgcggattctttagacggcgacatctggaccacgctgctgttcggcctcggcgtggagaagggctgcgcagcgctgcgtcagcggcaggatatcgacgcgattttcgttaccaaaaatcgcgacattattctctcatcgccgcagcggctgcgttttgcgccgctggacagcggctatcgggttattgactgtactgcttaagcaaactgtactgttcggcgaccaggcggtagcgatagaccggccgcccggtagcgccgtagtggatagtggtatagagaatattgatctgcgccagccaaatcagatatttgcggcaggaaacgcgggagatattcaccgccgccgccagctcatcggtagagaattcgacatccggatgggcgtcaatccactggcagagtgtgcgcagcgtttgcgcggttaaccctttaggcagcttgcgcgcgtcgctggcctccggcgcgccgccgtgcagcaggcggtcgacatcggcctgttcgtaatagggctggccggttattagcttgcgcttctcccgccaggtggtgagcgcctcttcaaagcgcggaaactggaagggtttgatcaggtaatcgaccaccccgtaatgcatcgcggtctgtaccgtggcggcatccgccgccgaggtaatcatgataacgtcgatggcgcgacccgactcgcggatggtcggcaggagatcgagcccgctgtcctgctgcatgtagacatccagcagcaccagatcgatctcctgctgcggatcgttaatcatctcctgggcctgactgagcgtcgaagcgctcccgctgcaacgaaagccgggaacccttgccacgtacaggcgattcagttcggccaccatggcatcatcgtcaacaattaaaacatttatcacgcaggtttccttttactatcccaggggagatgaacaaaaaattgggtaaatacgccgggttccgattcgacggcgagggtgccgccgagctcgcgcaactgctggttggcaagaaacagcccgacgccgcgattctcgcctttggtggagaagcctttgttaaagatagcgtcgatgttgttctccgggatccccggcccatcgtcgctcacttcaccgcttagccagccgtcctggtagtgcagcagcaggccgatctcaccctccgcctggccgctcatggcgtccagcgcgttctcaataaggttgcccagcaccgtcaccagcaccgtgacctgtttctcgttcggacaatccggcaccaggctctcctccgccagcgtcagggtaaagccgcactctgtggcgcgctgaattttacttatcaggaagccggccaccaccggggatttaatgcgatgttgaatgtcgccgatgtccgcctggtagcggtgggcggtctgcagcacgtattcctcgagtttgccgtagcttttcatattcagcagaccgaggatcacgtgcagtttattcataaactcatgggaggtggtgcgcagggcatccacatagctcatcatgccgtccagtcgctgcagcaattggctgacctccgttttatcgcggaaggtacagatggcgccgaccaccgcaccctggctgcgaatgggcactgtattgccgatcagcagcagaccattgcaccccagttcgcggtcgtacattggctcgccgctctgcagtacggtctgcagatcgtcgagcagggggctgtgaacgagagtcttatccgggccggaaaagaggatctcttccgccgcggggttgatgagatttacctcgccatgggcatcgaccgctaccaccccctccttgagggcgtgaagcatggcctgacgctgctgaaactgggtggatatttcgtgcggctccagccccagcagcacgcgcttcaggccgcgaaccaggctccaggtgcccagcgcgcagaccagcgcgctgaacaggatggtcagcagcacgtcccaacggctgttggcgatctgttcgtccactttactcagtgaaatgccgaccaccaccacgccgatttgctgatgccgttcgttgaacaccggcgtaaacacccgtagcgccggggccagcaccccgtggttgatggcgacattctcttttccctgcagcgtcggctgaatatcgtggccgatgaacggtttgccgatgattgagctgtccggatgcgaatagcgaataccctgcatatcggtaacgatagcgtacaacaggtcgttgcggcgggtaatggcctgcgccagcggctgaatgatctgctgctgcgggggcgcctccagtccgcgcttcacctgcggcatatcggccatggtgcgcgccaccgccagcgcggtctctttcagaccgtcgcgggtggcgttgctgatctgcatataccacaaggcatacaccagcagcagcacggcgccgatgacgctgccgatcatcaaggacacggcggtgctcagctttaacggtaaggcgcgttggcgaacgcgaggcgggtgctctgaagccttcatgacgaccccgggtagattcagtgaaagattattatcgccgatagcgcggcatacataaagccgtgtaatcaaagcaaaaggccgcttttgctacggcagactcctccagcgcgcggtacactgcggcttttcgccacaggcttaagggagacactatggaactggcttctctggtccgggatatcctccggcagcggcacgttgaacgtctggcgcagcatcgtgaacaggataatgaagcggaagcagagtgggagatcgcccgctggcggcatcgcagcggggtggtgatccagcgccgctatgagctcgagatcgcgcagcaggatagcgcatcctgcccggagtgctggattgactggcaggttatcgacgccgccggccaggagatcaacccgatgcgcaaacagttttataacctttgccagcaatccttctggctggctatgcaggcgggtggtgaagatgagacctcagacagaattgctcagataaccgacaatcacccgtaaacgcgcgttggggacggtaaactgtgaccccgacggcggtaaagcgcagaacattccacttatagtggcggcagaggttaaatagtcctgatgaatataaggatatgcatcaggccgctgattttgccgagatgcgctttttctgtcgtaaatggaggttgttatgagcagttcgctaaccgcgtcaatgcaggctcgtcgtcacccggagaccacccacatcgatcgcctcgccaccgccgatatgctggcgatgctgcatcaggatgataagcagatatcggaggcggtcggcgcctgtctgccggatatcgcccggctgattgatatcgccaccgcgacgataagccggggagggcgcctggtcattattggcgccggcgcttcgggccggacggccattgaggcggtcagcgactattcgccggaaggtaaacacgcgctggtggggctgattgccggtgggcagacggcggcgatggccgagcgggagactgcagcgaataattatgacctgggcgcctttgagctgcagtcgctggacttcagcaaccgcgatatgctgctggcgctgaccgtcagcggcaagacgccatgggtgtggggggcgatgcgccacgcctggtcgctgggcgccccgatagcggtcatcacccagcagccgaccagcgaggcggcgcagctggcggatatcattattgctccgcagaccgggccggaggcggtggcggggttagccaatccgaaggctcagttggcccagaggcagatcgtcaatatgctgacgaccggactcgccatccgtgacggtcgggtgtacagcaatttgcgggtggacgtgcaggctgacaattcgcactgggcggagcggcagatagcgattgtgatggcggccaccgattgcacgcgcagtgaagcaaaggccgccctggccagctgtcatcagcactgccgcaccgcgatcctgatgctgctcagcgggcttgacgcctggcacgcgcgggagctgctaaccaaacatcacgatcatctgcgtctcgccctgcgtgaagcccagcgtagcgctgtcactcccgcccagtaatcccttctctgccaggtgcgcgatgagcatgcgcgcctggacttttgtaattaaagaaattcttaacttttattttacccggcaatagatattgaattttagacgttatttttttatccgtcttcgctctatttttaaaattgattttttaagttaaataactgtttggtttaaaatgcgagagtgtaaatgatattttaaaataaagtaaaagtgcgttaatatgctgcctcttatgaccgtgtgctacgtgataattctattatgcctgcaatgaaaaaaacgattatttccttaaccgcattagcgatgttcgtcagcgcggcgacgcatgctgaagcggatacctcgaaaaaaaccgacttcctgctgattggcggcgggatcatgagcgcctcgctcggcacctggcttcaggcgctgcagccggactgggatctgaccatggtggagaaactggacggcgtggcgctggagtcttccaacggctggaataatgccggtactggccactcggcgaatatggagctgaactatacgccggagcgggcggacgggtcgattgacgtcagcaaagcgctcgatattaacgagcaatttatgatttcccgtcagttctggtcggcacaggtgaaacgcggtattttgcacgatccgcactcgtttattaattccacgccgcatatgagcttcgtctggggtgataatgtggattatctgcagaagcgttataacgcgctgcagcagaccaccttattccaggggatgaaattctccaccgatcacgcgcaaattaaacagtgggcgccgctggtgatggaaggccgcgatccgcagcagaaagtggccgccacctggacgccggtgggtaccgatgtcaactacggcgaaatcactcgccagctgatcggcagcctgaagaaaaataaccacttcaccctgcagacctcctctgaggtaacggatttcaaacgtaatgccgacaactcctggcacgtaacgattaagaatgtgcagagcggggaagcgcagactattgacgccaaatacgtctttatcggcgccggcggcggcgcgttgaagctgctgcaaaaaaccggtattccggaagcggacaactatgccggcttcccggtgggcggctcgttcctgatgaccgagaatccggcggtcactgcgcagcacctggagaaagtgtatggccaggcttcagtcggcgcgccgccgatgtcggtgccgcaccttgatgcacgttacctcgacggtaagcgcgtggtgctgttcgggccattcgccaccttctcgaccaagttcctgaaaaatggttcgttcttcgatctgctcagcactaccaccacaaataacgtgctgccgatgacccacgtcggtctcgacaacttcgatctggtgaaatacctggttagccaggtgatgctcagcgatgatgaccgtttcgctgcgctgaaagagtactacccggacgcgcgtaaagaagactggaaactgatccaggccggccagcgcgtacagatcatcaagaaagacgcagagaagggcggcgtgctgaagctcggtaccgaagtggtggtcgatcagcagaaaaccatttccgcgctgctcggcgcttcgccgggggcttccaccgccgcgccgatcaccctgaacgtgctcaagcagatgttcccgcagcagtttaactcgccggagtggcagagccgcattcacgctattgtgccgagctacggccagaagctgaacggtaacgtggcgctgacccagcaggtttgggatgacaccgctgcgaccctgcagctgacgaaaccgccggtgatccagatgccagcggctgcgcctaccgcgaccgccaagccggcagagacgccgcgcgaggcctcgccgcagcacgatatggcgctgtaaaagcaaactcgacagtgaaaaaagggaagaccatggtcttccctttgcgactggcatcagtttggatttcgataattattgaacttcctggttattttgttaattacctgggggcaaggtattttgatgcatgatggcaacagcacctcataaaatatcttaagaagaatcttctgaattcttaatcctaatcgtataggttttatcaaattctccgcctgtcgcgacatttgtaccaaacagtccgccagatattcgtatggtgacgatcccatgttttacgggtactccctgcaccctgacacaattatgcgcaggagaatcattacaataactcaaagttaatccggtgtcggatggggttatttcacctacaaatctttccttcccgttttcatctaaagctgatacggcgcctccctttattattatttcactggaataagctttcccaactgctgcatcagcaagtgagctaccatatggagtaacgtcagcatgtaaaacacaagctgacaataaagaggtaatacatacaacgctcaattttttcataatcacttcaatggcttgaaaaccattcccccaaagaatttgttgagaaaaaacgcacatcttttcccttttttatccagtaagttgaacggccccaagaaaataattttaaattaacatatccattatcgtcttgtgttacagaactatcccatacaacccagtgtgtaggtaacgttgtgttatttgtactgccttcgagcagtccgtcatttattaatgtgacgactttaaagccttgcgctacatacctatttaaatctcggattccttggacaccagcttgagtgattcctacattactaaagaccatttcataacctgctttttcaaaccattccgctagtgtgggccacatggtgatacctgccactggagaatcgagagcatcgaagctcagcgctgcattctctgaatccctcaggccagcaagcgttatccagtctagtcctaatattcttggctgcccatcactggtaaaaaacatacccgttggatgtctacatccctctcctggtgagattgtcagtgcgcctattttagtttttccatatcgccacagttccctggcggcctgggcatatacatcaggacggtcttgttgcagacagtaaaagaatgcagcagggccgcacacgctcgctccggactgagaaggatatgagagattatagaatctgtcctgaatttctgattctatcttcttttttttaaacggatcttgcggtgaacctatgggatactctcgcgcaataaatggacgttcaggaatagtaattcttatctcctttgtttccccaccctcgcttgcaggcttcattgtgccttttgtctcaaaataacagaggttctctcgctttaccgaagaccaggcgttgcctgatgcaaaggcttcaagtgtgtacattttagtgaatggaacgggggtcacacagaccgtatgcaacatggttttgcggtaaagattcatttccataatataaattgtcgagagtgactcatctacatttcctgtcatgtgagtttgtgtttcataagttccagaaaatggctgttgctttacatctatcaggggatatttattcctgctagagtccatacgataaatacacaggtcataaagcaaagaatctgttggaacattagatcttattcgtgtactaagcttgtaaactgccatcattaatccctcaatgtttaagcggctatccttgccggcatcatacaacattcatacccaacccacatccccgtttttgatggtactgtacaatgtctgaatcagtcgtttccgggaaaggctcaacctcattattttcgttatttacataaccgcctttccgggacgaaaattaaggtcaaccttattaaaagattatctttaacttgattttgagcggcctgatagtcttcaccttagtctctattgatatctccttgccagtaatgccgatgttggccacgcaattgtcggcgaagccgatctcattatcaccggatttctgatggttttgcgtacgtacagctggtatgggcccgataagcgaccggctgtcgtgttttacaggcactgggcacctgctccgtgttaaggctggtgcgggcgagagcgcgcgtttttttgcccatatctgcgtatcgtgaaagtgattacgccgattgcggtccgatgatcggcggacaactgattaaattcacaaggtgatacgtgatttttttggttgctggtggcagcggtcgacaatagtggtcgcaatcaaaatagttttcgtggttattgttatactggtttgaatttgtaaaagaaaattaaaccaggggtgtggaagggctatgaaagacgatattaaccaggagatcaccttccgcaagctatcggtctttatgatgtttatggcgaagggcaatatcgccagaaccgccgaagcgatgaaactcagcagcgtcagcgttcaccgcgcgctgcataccctggaagagggggtgggctgcccgctgtttgtccacaaagggcgcaacctgctgccgctgcaggcggcgtggacgctgcttgaatactgccaggatgtgataagtctgatgaaccgcgggctagaggcgacgcgcaaggttgcaggcgtcggtcaggggcggttgcgcatcggtaccctctattctctgaccctggaaaccgttccgcgcatcattatggggatgaagctgcgtcgcccggagctggagctggacctgacgatgggttcaaatcagatgctgctggatatgctggaagacgatgccctcgatgccatcctgatcgccaccaacgaaggggagttcaataataccgctttcgacgtggtgccgctgtttgaggacgatatttttctcgccgccccggcgaccgaacggctggatgcctcacggctcgccgatctgcgcgattacgccgaccgcaagtttgtttcgctggcggaggggttcgccacctatgccggattccgggaagcattccatatcgccggcttcgagccggagatcgtcacccgggtgaatgatattttctcgatgattagcctggtgcaggctggcgtcggttttgccctgctgccggggcgaatgaagaaagtgtatgagaaggatgtacagctgctaaagctggcggaagcctaccagatgcgccagctgatctctatcgtctattcgcaccatcgcgaacgcgatgccgatctgctggcgctggcggcggaaggacggatgtacgcccgcagtattaatcgctaagccgctgcgccagatggcgggcgacgtccaggccgctgcgctccagcgcaatggtctccccgcgccagcccgcctggcgggtcaggcaggtgagtaccccgccggggggcatctcaatggctaagcgcgcatcgcgctcatcggcggcgaccatcgcctcctgccagtggaccgggcgcgccatgttcatcgccagatcgtcggcgatccgctgcggatcccacagcacgcgcgccgtcgagccgcttaaataggcgcaccgtgggcgccttaagctggcgccggcaaaagctttcgccagctcagcggcgggtttatccagcagcgcgcagtgcgacggcacgctgaccgccagccgctgggctttactggcgccagcccgcagcgccagctgcgccacctcggccattgcctcatcacggcccgcaatcacgaactgcgtttcggcgttcaggttggcgagataaacctcgtggccctgcatcagcgcctcaacccgcgggcgggtcaggcccataatcgccgtcagtccgtaaccttcaggatacgcctgttccattaagtccccgcgcagggccaccagccgcaacgcgctggcgaaatcgagcgcgccggcaatcaccgcggccggaaacgcgccgatagagaggccgctgaccatctgcggatccacgccctgacgctgtagctcgcgcgcccaggcgacaccggcgatcagcagacagagctggaccgcacgggtgtgttgtagcgcatcggcgctatcgagggtatcgacttcatcccccagcacggcgcgcgcctgggtgaggattgcctcgcgatcggggatcatcgccagcatgccgggacgctggccgccctgaccgggaaaggtaaataaaatcttcattattcctccctgtgccacggcgtcgcggttaagcgcgcgccgcgggacgttttcagcagcgcgcgcccgtcgcgcagccattcattaagggcgaaggcgccgtacggcgtttcgacctgggtatcagcgcggcatgggagttgggccacccgggtctgccattccagcagcgcctcgcggtccaacggttgtgacgcgcggatcagcagatccagatcgctggccgcatgcagcaccgggatctcggttgccagcgcgtagccggtactgccggtgacgccccagccccagggccagcggtgtaaggtgagggcgatagccccctggaccggcggctgcgagacaaaaggcgaatggagtaagacctcacgatcaacaagcatctccggggtgacgctgcgcacgatattgcgcgcctgtacccagccggcggcgcgctgctcgcgcttcatgccccgcaccccaaccgggacgcgggcctggtcgtcaacgtcgcgcctcaccaccaccggcagcgcggctcgccactgctgagccacccacggctcggcaatatcttccagggcgctggcgtggtttaaccaaactagatcatggggacgcggcgttgctgacatggtttacagtcctgaagtcaaagagataaacagcggtagcgacaggatacacagaaccgagctcaacagcagcacggcttcagcatccggagactggacgccgaagcggttgccgaagaccacgccaaagaagccggcggccagggcaatcatcaggatcgcggtaatggcaatggaaccgtgcagcccaagtaacatcaccagaccccaggcaataaacggctgcaccagcagtttcacgatggttgatgtagcgatcagcgcattgagctgcagtttacgcgccgacaggatcaccccggtgaggaacagcgcggcggcggtggcggccaggcccagcggtttgatcgacgccagcagcaggtccggcattctaatgccgatcgcggaaagcaccaccccaagcagcgggccccagacgatcggttttttcactgaacgccacatcagcaccggcagcatcgccagcgtagaactgctgttttcacccgcggcgcgggctttttcacgctccagaatcagcaggcagaacggggtcatcagtaccgagccgcaggcgatagagaccgccaccgacagcgaggttgacgcgccttcacccagcacgctgccgaggatcggcagacctaacgcggcatagtttggcagggcgacggtgagggtcagcaccgcggcatcctgcggcgtgcgtttgaacacgctggtggcgaggaagtagatcgcggcataggtgatccacatcgccccggtcagcaccagcaccagcggcgactgggcgacgataccggcccacggcgtttgtaccgtcgcgctaaacagcgtggcgggtaaggcaaaatccattacaaaaatattaagcagcgagacgtttttgttatctaccatcccggccttaccggcccagaagcccagcagcataatgacgaaaatcggggcaagagcatgaataattacataagtcataaatcacctgtaaataaaatagagtactggcgcgattgttattttttctaaaagcagtcccttcccggagcgtttatttcgcgctccgggagactgcttccggcaggttttcttctactacttacgtacgaacgtcttaccagctggcgcgcatgcgatcgcgaaccagttgtgagctgcggcggttttccgcgcccaggcggcacttcagtgaggtatcggtgcgcgcgtcagcgatggcgtcgcgcagggtacggctgaccagcgacagatcgccttcgtctggcgcatccggattgctgatatcgagcagggcggagagcaggccgagcgtcgcatagttgctgacgtcgtaggccatcggcgggattgtcgccgccagtttctccagcgcctcaacggtacgcagcgtaatgcgcgccgccgacgctttacccatcgcgtggaccagcacgccgctatcgttaaaggcgatcaggcggttggcctgatagccgtgggccagaaacgccccggacatcgcttttccgacaatcaggccaatcaccgggtggccggcaagacgggctttggcgtaggcgcctgccgccccggccagggcctggtggatgccaaaggcttcttcgcggcggccataggcctggctcgggacatcaattaccgcgacgatcggtcgtttgacaggccgatcggcgtcggcggcgatggtttcgttgaccactttcgccagcgtccagccttccagcagtccgacttcgccgccggcggcgcgcgggtagtggttgttggcgtcaggcaccacggcgataaagcggacgctttcgccattaatctggccatctgtgacctgcaccgaagggcacagaccactcatcagcggcgcgtcgggcgccagtttattcagccatagcgcggcgcggtttgggaactgactcattatttatcctcccgggcaaaaagctgtttaatctgcgcggtatccgcctgctggcgggtatcgaattggctcaagcgacgcagataatcgtcatagttgtcgctgcggtgctgtgccggtacgcctttggcgatcgcctcaatcattgcggttttaacggcgttaacgccatcgttaaccagcgcgtcgaccagcccgctggcggcgcgaatttcgccgccggtcatgctccagataaacggacggttgcgggagtcgtactcttcaatgccggcttcctgctcgataacctgcgggccattgaggccgagacgggcttcacgggtgacgataaggtagctgcacagcgccgcggcgatggacataccgccgaagcagccgacggtaccggtaataatgccgaccaccggggtgtagcggcgcaggtcgacaatcgcggcatgaatatcggcgatggcggccagaccgaggttggcctcttgcagacgtacgccgccggtttcgaggcacagcaccgcctgggtcgggataccgttgcggttatcttccgccgccagctccagcgcggcggccattttggcgccggagacttcgcccatactgccgccctggaaggtgccttcgatggcaatcaccaccgcaggctggccgttgatcgtgcctttggcgaccaccataccgtcgtcggactgcgggacgatgccctgggcgccgagccacggcgacataatgccttcaaacggatccagcagttcgcggtagctgccgtcgtccagcagagcgtgggcgcgttcgcgagcgcgcagttcgataaagctgcgatcgttacgcatgagcggcctcctcaaatacttgttcaatacgaatacgagcgacgcccggcgtggcgccgaagtcgtggataatcaactgcccggcgggcaggccgttgatcaggttcagcctgtcgaacagcgcctgccagcgcgcctggctgttatccactgaggtggtgatctgtacgttgagcgtggcgctctgtgcggcggtataaagtacttccatatcgcctgaacccacgactcctgccagcgctcggccgctcagggcgcggttggcaggaaatgacaatgtaatctgttccataacatcctctgaatgcgttagccggaaacccggtcgagaaacagggtggcggcaaggagatcggccgcgccacccggcgaggcgttttgcgccagcatctgcgcatcaaggcgcgccagcgcggcgcgaccggcgacgctggcgcaaccgcccgccgccagaacctcgcgggcgccttgctgcatggcgtgcaggccgttcatgccggcgcgcgacagcacgcaggtatcgctcagcgaggtcatgatggccatcagcgcatcaaggcgcgcctgctgctcgctggcgcctcgcgcccggctttgctgcagttgcggcagcgccagggcggtaacatgcggaaatccgcgctgcgcttcttcgcgtgcgcccggcacctgccaacggcggctggcgcgcagccccttactaaagcttttcggcgcgaagccgtccggcaggcgggcaagggcggcggcggtcccggcgatcgcctgtgattgaccctctccacccaacatcgccaccgcgctgaccagcaggcccagcgcccagatagcgccgcggtgggtgttaactccacccgtcgccatcatcatctgcgcttcaccttcgcgaccaaggcggccgacggtttcgcgcagggcgatatccgtcggacgctgccagctttgctgcgccagagcgtgaaaggttggctgcaggctgcgggcggagcgttccatcaggtccagattgagatcctgatgcgcgccgttgccgcgactatcgaccagacccggtttcggactcagacgggcttcgtcaatcagacacgcgctggcggtatgcgccagccagctgacgcggctttctgcgtgtaggggggagagatttttcattaccagctccggaattttgccggtgggttgtacagtccgtcggaccactccaccagctcggcgacgctgccggcggccagtagcgagcgggtggcatcgctgcggcgaatgccgatatcttccgggtagaccactttgccgctctggcgcagcgcggcgacgcgtttggcgtccacaccgagaccaatatcggtgatcccggccaccgcggcgaccatcgcccggcgctcttcaaggctctccgcccggtacaggtaggcgataccctcttcggtcagcacgtgggtcacgtcatcgccataaatcatcaccggcgccagcggcattccggaggttttggcgacgtcgaccgcgtcgagcgtttcaacaaaagtcggttttacgccggcctggaaggtttcgaccatctgcaccaccagttttttaccgcgctgcatcgggtctggttcggtgatcatattgagccaggccggggtggcgtggcggcgaccgtgcgggtcgtggcccatgttcggcgcgccgccgaagccggaaagacggccgcgggtgacggtcgaggagttagccagaccatccacctgcagggttgaaccaatgaacatatctaccgcgtactggcccgccagctggcagaaggcgcggttagagcgcatcgagccatccgggccggtaaagaagatatccgggcgggcgcggatgtactcttccatccccagttcgccgccgaagcagtgcacgctctccacccagccgctctcgatggccgggattaaggttggatgcggattcagggtccagtgtttacagattttgcctttcaggccgagctgctcgccataggtcggcaacagcaactcgatggcggcggtattaaagccgataccgtggttaagcgactgcacctgatgttccgcatagatgcccttgatcgccatcatcgccatcagtatgtgttcttgcttaatcaggcgcggatcgcgggtgaagagcggttcgataaagaacggcttgtcggcaaccaccacgtaatcgatccacgagccgggaatatcgacgcgcggcagatcgcattcgtcgtccaccagttcgttgacctgggctatcacaatgccgtcgtggaaggcggcggcttccaccagcgccggggtatcttcggtactcggtccggtatacaggttgcctttgcggtcagctttatagccggcaatcagcgcgacgtttggcgacagatcgacgtacaggcgcgagtagagttcgatataggtgtggatggcgccgatttcgagcaggccatcttccagtagttgcgaaatgcgcaggctctgggtgccggagaaagagaaatccagcttgcgggcaatacctttttcaaacaggtccagatgctcgctgcgcccgacgctgggcataatcatatgcaggtcgtggattttttgcggattaacttccgccagcatgcgcgagaggaaatcggcctgtttctggttgttgccttccagcacaacccggtcgccgggggcgagcaggttttccagtacgctgaccaactggtcagtcgggatgaccttacctggcatgttcgcctcggccagccgccgctgtttttccgttcggcgacggttccagacccgccccgtcgtttgttcggcattcattaataacctcctgattcgacaaatcgttttgtttgtcctggtggagattagtgtgcgacgcgaggctatgagcatcaattaagcgcggtggccgatcgttagcatcagagtaacgattccgccgcaacgtttgtgatgcggatcaataatacataaggcgtagtggtctacggagagagtgtagggcagggagcaggccggcgaagcgccggcctgcggaaggactactgtttactaacatcgcttaataagaaagcgatactctgcccgccgctggtctgctcgagggcaattttgacgataatcgtcaacggcaccgagagcagcatgccaaccggacccagcaaccatccccagaagattaaggacaggaataccaccagcgtcgagaggcccagcccgcgtcccatgatacgaggttcgagaatattgccgaataccaggttgacgatcaggtagccggccagcactaccagcgcctcgtacagaccaccgaacaccagcacctgcaggatcggcggaatggccgccagcacggaaccgatattgggaatatagttaagcgcgaaggccagtagcccccacataaaggcgaagcgcacatccagcagcaccagcatgccccagaccaccaggccggtgatcaggcttatcgcagttttcagcaccagataatgcgatacgctgtcgatggcccgctggatggcgcccatgccttctactggtctggacattaactgctgcagcttagcgggaagctgcggcacctccagcagcataaacaccaccgtcagcagcagcagaaaaatagaagacatggcattcgacagctgagtgagcaggctggtgaccagggtcattacggcgttagggtcgatgtacttattgagctcgaccaccgaaacggtgaatcccatacgctgcagccagggcgcgatggtttgcatcggctcatagagatagttgcgatactgcggcagggtgcgcgccagctcgttgagcgaggtccccagcgaggccagcagcacaatggctaacataacaatcaggccaatcagtagcgagatcgccagcacgcgcggcacccggcagcggaccaggagctggaccagaggattgatgatcaccgccagaaaaagcgccaggataaacgggacgattatgtccgccgcaaagcgaatgccggtaaggatgatcaccagcatgcccaacatgatgaccatctttaatccgttaagtgtaataatgggtttagccataggatcccgacctcaaacttccttgcctattaacaggttgcgttacattagcataatgacgcttttttgcagaacaaacgcattgaagaaaaaccgcggcgtaaagaattgcaaagtctttgaattaaatgtagcactatgctacaaatctacctgtgtttaactactgaggacaattttcatccgcaccggacgagaagcaacaccgcggataattgtaattttatggacaatcagttcaggatgtatattttaaatcaccccgcagtatccctcactttttcccgttttgccggcgaacagcactggcattcggccctatagtcaccttctttctgcctgagctggcgccaagcgcacagcgatatctacgtcagaaattttcctgtttacgtctcgcgtaaacggtaatggattatattctcaagcaggagaagggatcatgttttattggattttattagctttagcaattattgctgaaattaccggcaccttgtctatgaaatgggcaagcgtgagcggcgggcacaccggctttattttaatgctggccatgattgccctgtcatatatttttcttgcctttgcggttaaaaagattgccctcggtgtggcctatgcgttgtgggaagggatcggtattttactgattaccctgttcagcgtgctgctgtttgatgagagtctgtccctgctgaaaatagccggcttgaccaccctggtgatagggatcgtcttaattaagtccggcacccagaaaaaagcgtcttccaagcaggaggtggcccatgcagcagtttgagtggatccacgccgcctggctggcaatcgccattgtgctggaaattattgccaacgtctttttgaagttttccgacggcttccgccgcaagatctacggcatcctgtccctggcggcagtattgggcgcgttcagcgccctgtcgcaggcggttaaagggatcgatctctcggtcgcctatgcgctgtggggcggcttcggtatcgcggcgaccatcgccgccggctgggtgctgtttggtcagcgtctgaataacaaaggctgggcgggggttatcctgctggtagccggcatggtgttaattaaactcgcctgacgtctcgccgcctgcaaagccaggcggcaaatggaaacttccttcacgcctggccccgctgtaattgtgtcaggtgacgctgagggctgcgcaggttcactgctttcggctggcggaaaatcatttccgccaggacgatgtcaataatgatattcttcaccggcctcggtccattactcaccggcaagcgcctccagcttatcgcgaaagccagtcaccgcaatggcgcgattgtccgcccgccagcgatcctgcgggccgggggccgaactctgcacggcgatcacctgccagccgtcctccgttttcagcagcagcggcgagccgctgtcgccaggcagggtgtcacactgatgcgacagtacgctggtttgcgcccaccctgtcacgatgcaatcctggtggctgtaaagattatcgagatgatcttcaggatagccagactgggtaactttacggtccgccgccttcagcgcggcggtgagatcggccttgctgcccggaaagagcgggatcggcgtaatgccagacggagcatagcgcagcacgatcagaccaaaatcggacggcgccgcagcggaagggacaatccagccgtcgccatcggctttcaggcgtctgcctaagctgggatcgactcgcccgtcaatgccgtggatctcatagacccagttgcccttgcgggaaataaagcgcagggcgaccgctttgtccggcttgccgcgcgggggcgttaacagacagtggcccgcggtcagcgccagatgcggagagatgagcgtcgccgtacacagattgccgctggcggtttccagctggccaatcgcgtcccacggactctcctcggggcggttcaccgctttgcggtcatcgtgaccgaaaaacaacgtcttaatatctttggcgctcagtccgctatcatcggcatgtgcgcccagaggtaacagataaaatgaacacagtaataacagaacgtctctacgcatatcactctctggggaggctatgatgtctattgacagtagcaggagatttaagtttttgaaagtaaacaataattctaaacaggccaaaccgtataccacatcagcgcgcggtggggtctggcgctggtaaaacctcctgatttcaagcggttaataccagtgttctgcttgtgctatttccgcagaaagtggcgtcttgcgcaacaaaattcatgtatcagaacgtactgaattcggttaataatgcagcaattcatccgtgggattattcctggtttgtcagcataatgcccaaaaataatacttttacccaccagatcttcaccggaattcgcacttctttacgcctctcgtaattattttcaatgcgaaacattttctcaccgaaaacgttgttaccgtcgccctgccgttgagtaaatagagaggtagtaccggcgatgatagcctgaactctatttcccctgcgttcggagggcttatgtctaaaaaaggtattcgcgcactggtttatgtttccctggtctcagtcgctatctggggcgcgaccggctatctggtgatggaagccgtgcgtgcattgtgatgggcgcgccacccggcaagggccaggcgtgcgacatattacgactaacatgtctggcgtcttctggcgccggacatttttttgcgccgcagagagtcacaggataatgggaagcgggaagcggggagcgggtcagcgatagccgcacggtattcattttaatgaaaagctggtagaagcagcaaaatgcgggcgcgggataaataattaagagaggaaaaaacgggttgcaaccactgcgcatataattagcaggatcaggatgagctcaaaacgatagcgccgcagcatagtgctctccagaaaaaacggcgctgaaacagcgccgattattaagaaggttggttcaccgggaggaattatgctgccggctgtgcagtcggtttagcggcctggtgtttagtggttttgtggtgttttttcgctgcctgcgctttctgggctgccggtttagccgcagctttgtgatgctttttcgccgcctgagctttctgcggagcagctggtttagctgctacttttttgtgttttttagcggcctgggctttctgagcagcggctggtttagcttctgcttttttgtgttttttggcagcctgagctttctgctctgcagccggttttgccgcggctttgtggtgttttttgtgatgggtggtcttggcagccgtgctgtgggtggcagccggtgcctgagtggtgcttactgcgtcagcagcgaaagcggcggaagagagacccatagcagcggcaacgaccagagctaatacttttttcattctgatatcctcgaaaagttttcttaatttcaaccccactgcggggccggtgaaataactatatgcttgtcttttcgagctttccgtgagtgtttggtatcggcgtgtaaccgaatgtacaaggcgggaacgacaggacgcgccgggtagcccggcgcgtatgattacaggtagcgagtggtcaggtgctcgcggaagtagcggctattaagatcctcaccggtggcctgctgaatcaactgcgaggtggtgaagcggctgccatgctgccagatattctgccgcagccagtcgaacagggcgctgaaatcgccttcctcaatatcgcgatctaatgtcggcagcgcgcggcgggccgcggccatcaactgcgcggcatacatcgcgcccagggtataggaagggaaatagccgaatccgccgtcggtccagtgaatatcctgcatgcaaccatcccgatagttgccggtggtcgacagccccagccagtgctgcattttctcgtcccacagcgacgggatatcatctacctcaatctcgccgtcgatcagcgcacgttcaatttcataacgcaggatgacatgcgccgggtagctcacctcatcggcatcgacgcgaataaagccgggtttcacctgctgattccaggcgacaaaattgtcctggctaaaggccggccgatcgccaaaccgctcgcgcaccgccggtaacaggcggttaagaaaccgctcgctgcgtcccagctgcatttcaaaaaacaggctctgcgactcgtggatagcggtggagcgggcgagtcctacgggctggtcgacccacgggcgaggtagattctgctcgtagcgggcgtggccggtttcgtggatcacgccgaacagagcgctgagcaggtcgttttcgttgtagcgggtggtgatgcgcacatcctggggtacgccgccgcagaacgggtgggcgctgatgtcgaggcgcccgccgtcgaagtcaaagccaaggatacgcatcgcctgcaggcccagctcccgttgttcagcaatggggaaaggcccctgcggggcgattagcgtctgcttcgcctgcttctccaccgcctggctaagcagggaaggtagccacgatttgagatcggcgaacaggctgtccagccgcgcgctggtcatatccggttcgaaaatatccagcagcgcgtcgtagcgtgagccgcccctggcatcggcgcggatctgcgcttcctgacggctcagtctgaccacctcgcataggttgtcggcaaagcccgtccagtcattggcgggacgctggctgcgccaggcatgttcgcagcggctgccggccagcgattttgcttccaccaggctctccggcagcagcgccgcctgatcgtactgacgctgcatttcccgcaggttggcctgttcaacatcattaagatcctgctggcgggcctcctgtaaccattgtcccacttttttatcggtcaggatctgatgctgcagcacgccgagctcggccagtgcttcgctgcgggcgacgctcccgcccgggggcatcatcgcgaacatatcccagccggcgatggcggcgagatgcgaaaagcgcgacaggcgctgaaaggtacgggtaagctgctgataaggcgtattttcagtcatagtggcgttcggtccgtgacaggtgaataaagagattatcgctttgcctctacactatcctgatacgcccggcgggtcgagcgttgcgcacaggggaagggaaagacacatggcgggagaataagctcacctctgtgatcggtgtgacagaaaacggtaacatatcggtactaaactgtgatcgattacacaggtctggaggttcggggggggtttatgaatccgttcacctggctgtttattgcactgctgtccgttgatgccgtcagagagctgatgggcttgtcttccataatgggcatgtggtgaaacgtggcccgcaggccacgtcacacgcgactatttcagtcgctgatgtaagcaggtgccggtcaacagcgcggcaaggagcagcagcgcgataaacccaccgacgccgttccagccgtagtgatgccagaataccccgcctaacgtcccggcaagacttgaacccaaataatagctgaacaaatacagcgatgacgcctgaccgcgggcgcggcgggcgcgtgggccaatccagctgctggcgacggaatgcgcggcgaagaagccagcggaaaacagcagcatgccgatgaaaataagccacagggaagaaaagagcgtcagcagcaggccgcagagcatcaccgctgtaaagccaagcatcaccggcccgcggccaaagcgtacggtcatggcccctgccttcggtgaactccaggtcccggtgagataagctaccgacagcaggcctaccaccgcctggcttaacgaccacggcgacatcatcagccggtagccaatatagttaaacagggtgacaaaagcgcccatcagcagaaaaccttcgacgaacagcagcggcaggccacggtcgcgccagtgcagacggaagttaatcagcagcgttttcggtcgcagcgaggtcgggcggaaatggcgcgactcgggcaggatacgccagaacataatcgccgcggccagcgcaaagccgctgatcgccgccagcgccacgcgccagccgaagaaatcggtaaagaccccggtcagcaagcggccgctcatgccgccgatggagttgccgctgatatagagtcccatcgaaaaggcgacgaaactggggtggatctcctcgctcagataggtcatgccgaccgccgctacgccgctcagcgacaggccgatgagcgcgcgcataatcaggatgccgtgccagctggtcatcatagtcgacaacagtgaacagcaggcggccagcagcagggcggtgaccatcaccggcttgcggcctatagcgtccgacagcgggccggtaaacagcaagcccaccgccaacatcgccgtggaaattgaaagcgaaatactgctgctggccggcgacacgccaaactcgttcgacagcaccggcaggatcggctgcacacagtagagcagggcaaaggtggccagaccggcggagaacagcgctagagtgacgcgcataaactgcggggtgccacgcttaataaacggatccgggcgggatgcaccagcgacgctgacctcgcccgccggcacggtgtcaacggttgttgtacgactcacagagaattccttgcgtagaagttgctgcttaccaacagagtgttgtgaccattcagctcacatttttagggtatgaaaatgtaaatattctgtctaatatattaataatctcaaataagacgttttaaatatgaatatcgagttgcgtcatttgcgctactttgtcgccgtcgctgaggagctacattttggccgcgccgcggcgcgactgaacatctctcaaccaccgctaagccagcagattcagatccttgagcagcagaccggcgctcgcctgtttgcccgtaccaaccgcagcgtcagcctgacggcggccggaaagcagtttctcgccgatagccgacaaatcctcgcccaggtggatgaggcggctgctcgcgccgcccgtctacaccatggcgaaacgggtgagctgcgcatcggctttacctcctcggccccttttattaaggccgtctccgatacgctatcgatgtttcgccaacgccttccggatgtgcatattctcacccgcgagactaacacccgcgaacagatagtgcccctgagcgaaggggctctggatttggggctgctgcgaaatactcaactgccggacactctggcgtgggagcgggttctgcgcgagccgctgttggcgatggtcccggcgaatcacccgctggcccgccagccctcggtcagcctggcggcgctggcgcgcgagcccttcgtctttttcgacccgcacgtcggcactggcctgtacgacgacatcctcggcttgctgcgccgctacggccacacgccgaagattgcccaggaggtgggggaggcaatgacgattattggtctggtggccgccggactgggggtatcgatcctcccggcctcctttcagcgcgtccagctcagtgaaatgcgctggctgccgatcgacgaacaggatgcggtatcggagatgtggctggtgtggtctaaacaccatgagcaaggggcactggcaaaacgctttcgtgaggcgctgctctcctggaaaagcgagcataattgaggcgaaaaggggctggaaatgtgcggtaaatcacaaggctaagtaaaaatttgacgttcaccgtcgaagtgcttcaccatagccgaaagtttatttcgaagcgcgaaaataagggagtcaatggtggtagcggatagtcaaccaggccatatcgatcaaataaagcagaccaatgcgggcgccgtgtatcgcctgattgatcagctcggcccggtatcgcgtatcgacctttcccgatttgcgcaactggcgccggccagcatcaccaaaatcgtccgcgaaatgctggaagcgcatctggttcaggagaccgagatccaggagcccggcagccgcggccgcccggcggtggggctgatggtggagaccgaggcatggcactatctggcggtgcgcatcagccgcggtgagatccatctttcgctgcgtgatttaagcagtcagctggtggtggaggatcagctggagctggcgctcaccgacagcacgccgtttctgacgcgcgttatcgaccatattgatcgcttctttattcgccatcaaaagaagctggaacgccttacctccatcgccatgacgatgcccggtattatcgataccgaaaatggcattattcatcgcatgccgttttatgaggatgttaaagatgtcccgctcggcgaagcgctggccaatcataccggggtgccagtctatattcagcatgacatcagcgcctggaccatggcggaatctttgtttggcgcctcgcgcggcgcccgggacgtcattcaggtggtcatcgatcataacgtcggcgccggggtgatcaccgatgggcgcctgctgcacgccggcagcagcagcctggtggagattggccatacccaggtcgatccctacggcaaacgctgttactgcggcaaccatggttgcctggagacaattgccagcgtagaaagcgtgctggagctggcgcagatgcgcatggcgcagtcgatgagctcgctgctgcaccagcgtccgctgagcgtggagtggctttgtcaggcggcgctgcagggcgatttgttagcccgggacatcatcagcggcgtgggtaatcacgttgggcggattctggcgatcatggtcaatctgtttaatccgcagaaaattctgattggctcgccgttcaatctggcggcagaaattctttttccggcaatttccagctgtattcggcaacaatctctcccagcctatagccggcatattaccgttgaaagtactcagttctccaaccgcggaacgatggctggcgcggcgctggttaaagatgcgctctataacggatccttactcatacgactgttacagggttaacattttttcatagtcacaccaaaaattgcgctatctcaagctgacctcagacggcttcacgtagactttgcccaccgttgattatttctctcccgtatatttcatcgacaaaactgtggggttagtgatgtttaagcgtttctttattacaggtacagacacctctgtcgggaagacagtggtttcccgtgcgctgttgcaggcacttgctgccagaggcaaaagcgtggccgggtataagcctgtggcgaagggcagcaaagagacgccggacggtttacgtaacaaagatgcgctggtgttgcagagcgtctccacgctggccttaccctatgaggctgtcaaccccatcgccttaagcgaagacgagagcagcgtggcgcatagctgcccgatcaactacggtctgctgtccgatggtttgcagcgtctggccgcgcaggtcgaacacgtggtggttgaaggcaccggcggctggcgcagcctgatgaacgacctgcggccgctctccgagtgggtggttcaggagcagctcccagtgctgatggtggtggggatccaggaggggtgcatcaaccatgcgctactgacagcccaggcgatcgccaatgacggtttaccgctgattggctgggtggccaatcggatcaaccccggtctggcgcactacgccgaaatcatcgatgtcctcagcaaaaagctgccggcgccgctgatcggcgagctgccttatctaccgcgcgccgaacagcgtgagctgagccgctacgtcgacttagacatgctcggcaacgtgatggcgatagatcgaatcccggcgtaacgtccgcgacagcacagacgacacgacgcaggttatcagcagaccgggcagcagcgtatactgcccggtcatctcgcaaatcatcagggttgacatgatcggcgcatgggtcgtggcggccagaaacgccgccatgccggtcagacccatcatgatggccatttcttcacttcccggtagccacagcctgctgaagcaggcaaacagcatgcccatcgccaggccgacaaacagcgtcggggtgaagaccccgccaggcgcgccggagccgctgctggccagcaccgccagcagtttgcagataaatacgcccaccagcagcgcaccggacggcggcagcagcaaatagctttgcactacgctgtagccgttgccccatactgccggggtgatgagcgataagccgccgacaattagcccgcccagcgccagctgccacggcggcgccagcttcagtttaacgaacccgcggtggctgtagtccatcagccagataaacagcggcccgcacagcccggccagcaggccagtcgccagcattaagccatagtgcagggcgctgaggttctgctgtaacacgacgtgatacagcggcgcggcgccgccattaagaaactgcgtcaacagcagggcgatcaccgccgagatcaccaccggcccaagcgaggccagcatcagcgtgccaaagagaatttcagcaataaacaggctgccggccagcggggcatgataggcgctggccatcccggcagccgcgccgcaggcgacccatagcttccattcactctgcggcgtgaagcgacgggcaaacagcgaggccgccagcgcggccagcaggatcatggcgccttcccggccaatcgcgctgccggtcaccacgaccagcaatgacgccagtgatttcaccaggcttgccggcgtatcgaaacagccgtcgccggtctccagggcttccatataatcggtggcggcatgtggacgcgcgacgctgcgtcgttgccagagccagagtaaggttcccgccgtcaggccgcccagcgcgggggtaaccagccgacgccacgccggcagcgactgtgcggcgttgaccaggctcccactgtcattactgagcaacagcgtttccagcaccaccatagcgtggcgaaacagcgccaccgccagggcggcgagaaggccaatcagggtggcgatcagcaggcggcgaaacatcacctgcacatcaggatagggatgaagacgatgcattagtcacggcgaggttcggaaaacattggcttattgtgatagggaataaccttagatgcaaaagcgataagtgcgggtgaaaggctgggaagcggcaaaataaaaccgcgccggataccggcgcggcgaagggttaacgatagagcggtttttgcgccacggcgatcggcagattctcctgccactgcgccagagtcgcctgcgccagctgacccagcgtctgatagaaggggtgggcggcatggtcgacaaagacgctcaggaaacgcccggaccacggcagcaggtgccaggccagcagctgagcgaacaacgcatcctgctccgtttcgcacaaccatgccgccaggagtagcacggtgccgaaatgatcttccggttcgttgccatcggcctccagcgcgataccgttctcgcgcatccactggcgcagagccagcgtggaatcgccaaacagcacagactctttatccagccagacagagccccagggcggcgccggcagggcccatggcccgataaacaggcgctgccaggcttccggcaacgtttcttcagccgatgcggcaaaccctgacgccagcggggctgcgaccgggaagggccactgctgctgccagctcccgtcctggaaggcggcgaccagcggcgcaatttccgcactattcggcgcataagagaacagcgcgcccagggtgcgggcgcttaacgcgacggcgtcgcgatttgggatcggcatcatcacttattcctttctgcggcgcgcgcctgcgcgccgtctcattaaccggcaaccgccataccgacggtcatatgcagaccataaaacaggccgcggccaatacattcggcgatcaagaccagcagcaggccgatcagcagccccgtagcgcgcggcggctggcggcggatcagcggacatagccagcagccgaggcccagcgccagcagtaccaggcgtagcgcctggagtttaccgtaatctggcagcagggtggccgcctgctgaaccgagctgtgaagggtactgagcccggcgctttgcataatgataactgcggcgctgatgaccagcgcggccacgctcagtccggcaaaaaaccagccgttaaagtcgactttcgccagccgcagcagcagggcggcaaacagcggcccgctgaggagcaccgtcagaaagaacgcgctggtggtgtagccattgtaccatgttggcacggtattgatttgataaacccgggtcattgcgaggacaaacagcagccctaacagcatggcgatcgccagccagactttacccagcgtcgccggcattttttccagcaccgccagcagccaccagaatccgcccacggcgaagaacagagcgccgctggcgatttcgttgctcagcgccgaggcgccgatgcggttcagcgagttaaacgcgcgcagcggtgaaccgagatgcatcaccgaagcaagaaaaccaatgcccatcaacagccagataaaaaacatattgcgcaccagccgccgccgggcttcccgttggtcccccagcgccagccagccaagaccgctgacgatggtcgcgccgaccacgcactgacccagcaccgtaaacagcaccagcggccattcatgccatccgtttcccatctcacacctccttcgggttcgccaggtaaccggtggtatcgccacacggccgggcattggcgttaggtttgataacgatactcggccgggtaaagtgcgccgacggcagcggcgctaccgcggccagctggccgtgcttagcgcgcagttcggcaattggcccgaaatccaacgcccgcagcgggcaggactcgacgcagatcggctttttcccctcggcgacacgctcgtgacagccatcgcacttggtcatatggcctttgtcggcgttgtactgcggggcgccgtacgggcaggccatatggcagtagcggcagccaatgcatacctcttcgttgaccaccacaaaaccgtcttcgcgcttatgcatcgcgccgctcggacagaccttggtgcaggccggatcttcgcagtggttacaggcgatggagaggtaataggcaaacacgttctgctgccagacgccgttgtcctcctgccagttgccgccggcatactcatagatccggcggaagctgacctccggagtcaggttcttgtagtccttacaggccagctcgcaggttttgcatccggtacagcgagcggagtcgataaagaatccatattgcgtgctcatggtttactccttaaaccttctcgatatcgaccaggttggtatgctgtggattccccttcgccagcggcgacgggcggtgggtggtcagggtattcatgcaggcgccatggtcgatccgatctccggtcatattggcgtcgtgccaggcgccctggcccatcgccgagacccccggcatgatgcgtggcgtcactttcgccggaagacggacttcgccgcgctgattaaaaacgcgcaccatatcgccgtttttaatcccgcgtttttccgcgtcaagcggattgatccatacttcctggcgacaggccgcttgtaatacatcaacgttgccgtagctggaatgggtgcgcgctttatagtggaaaccaaacagctgcagcggatactggctgcgcagcggatcgtcccagccttcaaatgtggaggcgtagaccggcagcgggctaataacttcgtctttctccagctgccagcgggcggcaatctctgcgagtcggctggagtagatttcaattttgccggacggggttttgagcggatgcgcttcaggatcgcgccggaagtcgcgataggcgacgaagtggccgttcgggtctttgcgcttgtagatgcccattcgcttcagatcctcgtaggccggcagcgccggatctttcgccaccattttggcgtacagatactgcagccactgttcctgggtacgcccctcggtaaaacgttgatgcacgtcgtcgccgagccgtttcgccacttcgcttaggatccagtaaatcggcttgcgttcgaacttcgccgaggtggcgggctgaataaaaatcagatagcccatattgccggcgtaatcgttaggaatgatatcctcctgctcaacggtcatcaggtcgggcagcagcaggtcggcgtatttcgccgacgaggtcataaagttgtcgataaccacaatggtttcgcacttgctttcatcctgcagaatttcgtgggtcttattgatgtcggagtgctggttgatgatggtgttgcccgcgtagttccacaggaacttgatcggcacatccagcttctcttttccgcgtacgccatcgcggctggcggtcatctctggaccgcgggcgatggcgtcggtccaggtaaagcaggagatggcggtcttcaccgggttttccagcaccggcaggcgctcaatggtgatggtgtaggttgattcgcgggcgccgctattgccgccgttgatgccgacgttgccggttaagatcggcagcatggcgatcgcccgggcggtgagttcgccgttggcctggcgctggggcccccagccctggcaaatgtaggccggcttgctcatgccgatttcgcgcgccagcttaatgatgcgctcggtggggataccggtaatacgcgaggcccactgcggcgttttagcgatcccgtcgtcgccctcgccgaggatataggctttgtaatgaccattcgccggcgccccggccgggagcgttttctcgtcgtagccaacgcagtatttatcaaggaaaggctggtccaccagatcttcgttaatcaacacccaggcgataccggccaccagcgcggcgtcggtgccggggcgaatggggatccactcatcttcccgaccggcggcggtatcggtgtagcgcggatcgatgacgatcattcgcgcgttagagcgctcgcgggcctgctccagataccaggtaatgccgccgccgctcatccgggtctccgccggcttgttgccgaacatcactaccagcttgctgttttcaatatccgaggtgctgttgccgtcgttactgccgtaggtgtagggcatggcgcaggcaatctgcgcagtactgtaggtaccgtactggttaagcgagccgccgtagcagttcattaaacgcgccaccggcgacgcggaaggcgacgaacgggtgatgttgccgccgacgatccctgaagagtagttaatgtatacggcttcgttgccatactgcgctaccacgctcttcaggcggtcggcgagggtatccagcgcctcctgccagctgatgcggacaaatttgccttctccgcgcttgccgacgcgcttcatgggatagttaaggcgatccggatgattgatgcgccggcgaatcgaacgcccgcgcaggcaggcgcggacctgatggtcgccgtagcggtcgtcgccggtgttatccgtttcgacgtaaaccacttcatcatcacgcacgtgcagccgcagggcgcagcggctgccgcagttaaccgagcaggcgccccagacaatgcgggttgtgtcgcctgtagcctgttgtaccgccgccgcggcgcggcgcagcgtaaagggcagggtcagcccgccggcggccagcgccagggagccgagggctgtagattttagtagcgcgcgtcggctgacgccgccgggagattcctgattcgacattgctcactccatgatcgttatgttgtacggagaagggccgctgtgccattaacagacgcaggggtgagcgataatacgttatgggtagccagtagaccttatccctggtcaatgcagggataagatctttcatttgaaaccgaagagggcttactgagcgtcgttttcggcgggactgtcgctgttacgcgtataggtgattttgaaggtgtcgttggcgcaatgaccgaccacctgaaccccgggctggtctgcctgatcgtttggcacaatggccaggctgaagctggtttccggtacgccattgttgatgatcttctgctggatgtcgcttttgacccgttcacaggagtcgggagccgccagtacggccgtggagcacagcagtagcgcagcgccggtgcagagggatagtttcatcttacgctccttatcgatgttatccagatttaagcatagcagaactggtgtaaacaattgtatttgctaatatgatcggatgtacacaaaaggaatcgtctgtgaaaagattgtattggctgatcccggcagcgctgctgctgacggcatgcgaccgtaaaagcgccccggacgccttcaccccggagatggcgagtttttccaatgagtttgagtttgatcccctgcgcgggccggtgaaagattttagccagacgctgctggatgaacacgatgtggtggtcaagaaggtgagcgctcagctctccagggaagggtgtttcgatctgctgaccctggaagatgtggagaacaaaaccggcgccacgctgctgctggacgccaactattacgtcgacgggcgcacccacgagaagcggctgcgcctgcagggcaagtgtcagctggcggagatgcctgccgccggggtgagttgggagacggatgataacggttttattatcagcgcacgcggcaaagagaccaccgccacctaccgctatgacagcgatggctatccgctgggaaaaaccaccaccgccaaagaggagcgatttaccgtcgcctcaacgccgtcaaaggatccgcgtaagaaattggactataccgccatcagcaccttcaacgatcgcacgctgggcacggtgcgtcagacctgcgactacgacgatcacgacaatccgctgagctgtgagctgcaggtgatcgatgaaagcgtccagccgccgctgacccgccactacaccattaaaaaccgtatcgattattactgagccgtcggcttcagcagggacggcccgggcgttttgtgctcggccagatactggtgctggaacaggcacatgcggatggtgttgcggtactcgccgttaatgaaaaactcatggatcagttcaccctcgaccataaagccgagcttgcggtaaatatggatcgctttttcattctctttatcaacgattaaatacagcttatacagattgagcacggtaaagccatagtccatcgccaggcgtgcggcgcgggtggcgagaccttttccctggaagtcgggggagatgatgatctgaaactcggcccggcggtgcacatggttgatttcaaccagctccaccagtccggctttatcgccattgcattcgatgacaaagcggcgctcgctttgatcgtgaatatgtttgtcgtacagatcggagagctcaacgaaggcctcgtacggctcttcaaaccagtagcgcatgacgctggcgttgttatcgagctggtggacgaagcgcaaatcttcgcgctcaagcgggcggagtttgacgtgtagcgcgtcggtcatggagattcctgtggtcaaaacggaaaagggattacagaaaggcggcgcccgcaggcgccagcgtggtcagggagcggctcagggattgatcgcgcggccggtgcgacggtcaagacagcgcagggtgtttggctcccaataggcattgacgttggcgctcttctggcagttatcctgcgcgtcgaaagcgacatcggctttatcccactctttttccgcccgtttgttcaccttctggcgcaggctgcgggtgtcgttccattgctctttttccatcgacgcctgctgacggctctgcgcgctgtcgccagattcaatcaccagccggtcggtggcggcataggagctggaggtgtagaccacagcgcttaacgccagaatggcggtcaggcaccagcgtttgttcagtgtcatgttcatcacgatttcctttaagtgatgggttaaccctcaggttcagtttactacagctcttttgttgggcatagccggcaaaacagcgtggggcagaggccattatcgcgtagaatggttcaacgctttgtctcttttacgaatcttttaatgctcaaaacaacgctgctgttctttgctaccgctctgtgtgaaatcgtcggctgttatctaccgtggctatggctcaagcgcggggcaacgccgctgctgctgatccccaccgccctggcgctggcgctattcgtctggctcctgacgctccatccggccgccagcgggcgggtatatgccgcctacggtggggtgtacgtttgtaccgcattgctctggctgcgggtcgttgatggggtcaaattaacccattatgactgggcgggcgcggccatcgccctgtgcggcatgctaatcatcgtggcggggtggggacgggcctaagcccgtcatgtgtgatccctgccgcttttttcaactctaattcttgtatggtagtcgacctgttgccttacttatcagacatcctatttcatatgactctgtaaggaacaacgatggctatcgagactcttgccgcccggaccggggcgacgccgttacgcatccgtcgggtgcagaagatcaccctgacgctgctgtttatcgcgggtatcgtcaactttcttgaccgctcttcgctgagcgtcgccggggaggcgatacgcgccgacctgggccttagcgccaccgagttcggggtgctgctctccgccttttcgctctcttacggcttcgcgcaactgccctccggtattttgttggatcgcctggggccacggattgtgctgggcgccgggctgattttctggtccgcaatgcaggccctgaccgggatggtcaattcgttctcgcattttattctgctgcgcattggcctcgggatcggcgaagcgccgtttatgcctgccggcgtgaaatcgatcaacgactggtatgcgcaaagagagcgcggcacggcggtgggaatattcaactcctcgacggtgctgggccaggctatcgccccgccggccctggtcatcatgcagttggcctggggttggcgaacgatgtttgtggtgattggtttagccgggatcgtggtcggcctgtgctggtatgtgggctaccgtaaccgtcggcagtttaccctgcaggaggaggagcagcagtatctggccagtgaggaggcggcccgcccggcgctgaagtttagcgaatggctggctctgtttaaacggcggactacctgggggatgatcctcggcttttccggtgtgaactacaccggctggctgtatatcgcctggttgcccggctatttgcaggcgcagcaggggttaagcctggcccgtaccggctgggtggcggcgatcccgtttcttgccgcggcggtggggatgtgggtcaacggcctggtggtcgatgccctggcgcgcagaggctacgatcaggcgaaaacccgcaaaacggcgattgttatcggtctggtgctgtcggcgctgggcaccttgctggtggtgcaatcgtccacgccagcccaggcggtggcttttatctccatggcgctgttttgcgttcattttgccgggacgtccgcctgggggctggtgcaggtaatggtggcggagcataaagtggcttcggtggcggcgatccagaacttcggcagctttgtgtttgcctccttcgcgccgatcgtgaccggctgggtagtggatacgactcactctttcaatctggcgctggtgatcgccgccggggtgacctttaccggggcgctgtgctacttctttatcgtcaaaactcgcatcgattaacaacgctcggcgattcgtcaacagcaggcccgcagggacgcgcggccgccatgttcttctcctgcgctatcctgtcactgcggcgattgcagccacgtgccccgtgctttatcaggcgagatcttcttgtatggtagttgacagaaatcaaagatgttataccaattgcgtgagatggttgaggcacaaaggcattctcctcgagagttctccctgagaatggttgatgggctacataacaacgagagtcatcatggaaaacaccctcttaaccgctaacgccacgctgccgacctacgatcgcagcgcactgatcccccgtatcgttcatcttggttttggcgcgtttcatcgcgctcatcaggctgtgtatgccgatatactggccagcgagcacggcagcgactggggctacaccgaagttaatctgattggcggcgagcagcagatcgccgatctccagcagcaggatctgctgtataccgtcgccgaaatgtccgccgacgcctggaccgcgcgcgtggttggtgtggtgaagaaggcgctgcacgccggggttgatggtctcgaagcggtgctggcggcgatgtgtcagccacaggtggccattgtctccctgacgattactgagaaaggctattgccattcgccagccagcggcgaactgcagctcgatcacccgctgatcgccgccgatttgcataacccgcaccagccaaaatcggcggcgggggtagtggtggaggccttatctcgccgccgggcggccggcctgcctgcttttaccgtgatgtcctgcgataacatgccggaaaatggtcacgtgatgcgcaacgtcgtctgcgcctacgcccgggctctggacgaggatcttgccgcatggatagagcagaatgtcacctttccgtcgaccatggtggaccggattgtcccggcggtgactgccgaaaccctcgataaaattacccagctgaccggggtgcgcgacccggccggggtggcctgcgaacctttccgtcagtgggtgattgaggataactttgttgccggacgtccgcagtgggagaaagcgggagcggaactggtcaccgacgtggtgcctttcgaagagatgaagctgagaatgctcaatggtagccattcgttcctcgcttatctcggctatctggccggttatcagcatatcaacgactgtatgcaggacgataactaccgtcgcgcggcgctgtcgttgatgctggacgaacaagcaccaacgctgaaggtgcagggggtggatctgtcacgctatgccagtttgctgattgaccgttactgcaatccggcgctgaagcaccgcacctggcagatagccatggacggcagccagaagttgccccagcgcatgctggactccatacgctggcatctggtgcatcagcgtgattttacactgctggcgctgggcgtggcagggtggatgcgttacgttggcggcgttgacgatgcgggccagtcaatcgagatatgcgacccgttgttgccggttatccagcaagcggtggctgccagcgccgatggcgaagcgcgagtcaaagcgctgctgggtattgaggctattttcggcgtcgaactgccgcaggagtcacgctttgtcacggcggtgacccgcgcctacttagcgctgcagcggcagggggctaaagctaccgtcgccgcgtgggccgccgcgcaataatctttttccggtgtcggtcccggggtcgacaccggctcttcagttatttctacgatactccgctgatgtctattttttgctagcgatcggttttagcagacacagaatatgatcgaacgcaatgtctatacataactctatatttccctgatttactaaagataattagctgttatttttccgaacaatgactggtatttcaccgcaataatggcatagttaagttattgaaaaagaactttctctgcaaaaggagtacgggccatgtataaaaaaattttattgcctgttgatgtctttgaaatggatttaagcgataaagcggtgcgtcacgcggaatttctcgcttcggccgaaaatggcgagatcaccttgctcaacgttctgccgaacagcagccgttcgctattgcgcggttttacggcggatattcgtaagtttgaagcctatatggaagaagagtcggagaaaaaaatgcgcgaggtggcgcgactgttcgccatccccatgacgcggatccatacccgcgtagtctttggcaacgtgcgtgacgaaattctggctatcagtaacaacgaagagttcgatgtcattgtgattggttcccgcaaaccagggatctccacccatctgctgggctccaacgccgagtcaattctgcgctacgccaaaacgccggtattggtcgttagataatcccttcaatgacgacggctgcgtcggccatgccggcagccgtctgactcttattcttcactaaaccagtcgcggttctcctggcgaatcagcagtacggattcgctgatttcatgcaaatggatactcatggctttttctaccgcctcggcatcgcgtttttccagcgcggtgaaaatctcatgatgctggcgcagaagcatctcaggagaggtgacatggtccagactcatatagcggacgcgatcgatggcggctttaatattttccactgtctcccaggccagctgacagtcggcaataatcgacagcttctggtgaaattcatcatcgagcaggaaaaagtcgtttaactgctgccgatcaacggcaatacgctgctggtgaagattctgttccagctgataaagttgctcttcgttaatcatgccggcggcacggcgaaccaccgcgcactcgatcgcctggcggacgaagcaaccattacgcacctgcgacaatgagattttattgacgtagctaccgcgctggggacgaatctggataagtccgttttccgccagcttaatgaaggcttcgcgcaccggctgacgagacaccgcaaaacgcacggagacttctttctccgacagcggtgtaccaggcgggatcaggcagtgaacgatatcccggcggaggatgcgataaatttgctgattgacgggttgcgtcggattcagttgcgattctgcggccattgatggttactttttagggggttatgcgcactattttacgcgttttttgcgtttccgcccatacccggcccgcaggccgggtggctgacggttagccctgacggtgaacgctgagtccggcaaagctctgactcaccggcatcatctccagggtgttgatgttgacatgtttcggcagggtggcgacccaccagaccgcctcggtcacatcttccggcgttagcgcttgggtattttcgtaagctttttcggctttagcgtcatcgcccttaaagcggacgttagaaaactcggtgccgcccaccagacccggctcgatgtcggtcacgcgcaccgcggtgccgtgcaggtcggtacgaagattgaggctaaactgacggacaaaggctttggtcgccccatagacgtttccgccggcgtaaggccagctgcctgccgtagagccgatattgatgatatggccgcgattgcgctccaccatccccggcagcacggcgcgggtcatgtacaccagccctttattattggtgtcgatcatatcttcccagtcttccacactggcgcggtgcgccggctccagaccaagcgccaggccggcgttgttcaccagcacatcgatagcctgccactcggccggcaggtcagcaatcagcgtctcaatggcggcgcggttgcggacgtcaagttgcgcgatataaaggttatcgcccagctcgtctttcagcgtcttcaggcgctcttcacgacgaccggtggcaatcactttatgaccgttagcgataaaacggcgagtaatactttcaccaaaaccggcggtggcgccggtgaccatgataatcatcttactgttcctcaacgctttttgtgttttcataccatagcacgcacaggcggcgaccggtaacggaaatcattgcgaccccttaaggagaggcctaatcttacagcattagcctgtacaggagagaaagatgtccgaacgaaaccccttttttagcgtcagtacgttgccttaccaggcgccgccgttcgatgtgattgacgacagccactatcgcccggcgtttgatgagggcgtccggcagcagcgggccgaaattcgcgctattatcgacaatccgcagccggccagtttcgccaacacgctcgaggcgctggagcagagtggtcagctgctggcgcgggtgacgcgggtctttttcgccatggctggcgcccataccaatccttatattcaatcactggatgaacaattttccgccgaactcgccgagctggggaatgacatctggcttaatgcggccttgtttcagcgcgtgaacagcgtctacgagcagcgcgacgcgctggcgctggacagcgagtcctatcgtctcctgaccctgacgtggcaacgttttgttcacgccggggcgacgctggctcccgagcagcaggcggcgctgcgcacactgaacaccgaagcggctacgctgcaaagtcagttccagcagcgactgctgggagcggcaaaaagcggcggcctggtggttgattaccggcatcaactggctggcctgagcgatgaggagatagcggcggcggctgacgcagcgcgtgaaagagggcttagcgaccgctggttgctgacgctgaccaataccacccagcagccacagctgcttgcgctgcgcgaccggcaaacgcgggagaatctcttcgccgccggctggacccgcaatcagcagggcgatgagcatgatacgcgtgacctggtactgcggctggcggcgatccgtgcgcagcaggctgagctgttgggagccgctgattacgccagctgggcgctgaccgatcaaatggcggcttccccggcggaggcattgggctttatgcgtcagatcgcgccggctgcgcgggcgcgggcggaacgagagctggcggacatccagcaggtgatcgacaacgaaggcgggggttttcgcgcgacggcatgggactggctttactacagcgagcaggtgcggcgggctgcctacgccattgatgacgcgcagctcaaaccctattttgccctcgagcgggtgctgcacgacggcgtcttctggacggcaacgcagctctttgggctgcgctttgttgagcgctttgatataccggtctatcacccggatgtgcgggtctgggagatcttcgatcacaacggcgaagggatggcgctgttttacggtgactactacgctcgtgactcaaagagcggcggcgcatggatggatgtgtttgtcgaacagtcgactctgcgcgcgcagcgcccggttatctacaatgtctgcaactacctccgtccgcaggcagggcagagcgcgctgctgtcgtgggatgaggtgatcaccctgtttcatgagttcggccataccctgcatgggctgttcgccagccagcgctacgccagtctctcggggaccaatacgccgcgcgattttgtcgaatttccttcgcagatcttcgaacactgggccagccagccgcaggtgtttgcccactacgcgaagcactaccagtccggggagccgatgccgcaggcgctacgcgacaatatgttgcgtgcggcaaccttcaataaagggtacgacatgagcgagctgttggctgctgcgttactcgatatgcggtggcatagcctgtcgacctcggcattaccggaggaggtggacgcgtttgagcagctggtgcttcgggaagagaacctggatctggcggcggtccccccgcgctatcgcagcagctatttctcccatatcttcggcggcggctatgcggcaggctattacgcctatctgtggacccagatgctggccgacgacggctatcaatggttcgtggagcagggcggtttgacccgtgagaacggtcagcgtttccgtgaggcgattttatcacgcgggaacagcactgatttagctgaactgtatcgccagtggcgcggacacgatccgcagattgagccgatgctgaaaaatcgcgggttgagtgcgtagggcaattttagtctgacaagataaccgggcgcgctgcccggttttttgtctgatctagtcgtaaccttatatttcttttacctcacgctgcctaaatctttatcgctctctctccctttaagcattagcgtggcttcttcgatacgaatgaagcgcccggaatcatctatttcagcgaacatataaacttccatgtccacctcttctccgctgcgcctggtgcacagaacgcgatgccttgtggcataaagattcccgttacgaagttcgtcatgtaactcaattttagcgaaggcgataatttcccggagtctacgcgcatgctgagcaaagccatctaatccttcccacttgttatcagtgcgctgccgataaccgggactaaaatagcgactgagtatccgatccagtggtatctgttggtggttgataatgtcatccaataccctagtaatagtaatcattttgatggttagtcctctgtgaaagtgatgaatactttacaatcgactaactggcttcagtacggtataaaagacattaaacacctcaaacacgccaatatgcacgatccattgattccattcgaaccggtgttttcaccccagggacccactttactcgtcgcggtacgtcagtctgaggtaatacgggagactccacgccaccatcacagctgtgggcagttaatcggtgccatacgtgggctacttacggtcgatggcggtgattgtcgctgggtggtaccggcaacacatgccgtctggataccgccaggtgttccgcacggcctgcgctcgcacggtccatattcaggatggagtgtttatgtttctgccaaagcctgtggcgagctacctgataagccatctgttctctcaatgacaaatctgctgcgtgaagcgataacgcgagcggctgcatggcaaggtgtagagcttaatgcgtcccaaaaacgtttagctggcgttattcttgatgaaattggttcccttcccagggttaatcttgggcttccaatgccgcaagatagccgattgctcagaatcgcgcaggcgctgtcagcaaacccggacgacgggcgcaggttggaagaatgggcagcctgggccggcatgtcatcacgcacgctcacgcgacgattccgagccgaaacgggttttagcttcaatgaatggcgacagcggatacgcttactcagggctcttgagctactggctgccggcaagccagtgacggcgatagcgctggatctgggatatgacaatgtgagtgccttcatagccttgttccgtcggatgttcggcactactccagggcggtataaaatttaattatctcttcgctgaatatgatgcgttatccgccgctttgattacgtttgtcatgggctgagaggggcaagtaattcgggcccctgatttttcacattgccgaccgcccgcgttaccgggtgccaggtaaaatcgtcggcggaaacggctccgtcactggcaatctccgccgcttccgcgccggtgacatcctgcctcatccattcccgggcggcttcaggcgccaggaccaacggccgacggtcatgaatatcgacaagaccgcgatcggcggcggccgtcacgatcaagaatccttcggcatggtccccacgttcgaacggagtccgaccaatcgcggccataaaaattggctggccatccttacgctggataaagtatggctgctttttatttccttcctttttccactcaaaccagccgtcggcgaagcagatcgcccgtccgtgctcccacagcggcttgaacatcctgctggaggctgcagtctcaacccgggcattaatcagcggcggtttatcccaccatcctggcgcatagccccagtaaacggcatcgagatggagttgctcatcgcgttcattgaggagtaaaacttttgtcccgggcgcgacgttatagcgcccgataggcgccgggtcccaggcaatatctcgttcggccgcttccacgagatgcgccaggtattcctcccggctttgcgcttgcgcaaaacgtccgcacatagccacctccagcgtgatgtctgactaacagtatagaacagctgcaaaacggtgttttcacctgcccaaataccacgctccttccacgtcagtagaccattatttcaggccgtcatcttgcctgacgtcgcgacagtacacgctgggcgttaggcctggcattgtccgtttatgcttcatcgttattaccctaacgcctgtctgataaaggaaatcgtttttactctttttattatctttcagaattatcgcacggagttttacctttgtctgaaatggttgtcgctgggttgtatttgaaaacatccaccccttattatttaaaaaatcatctttatcttttaaaaggttgttatgagtaacttactattattagtcctggcggtggtgttattgtttacatctttgttttttggcctgtcctatgttagagaaagaagaaaaatgaagatgcgctttaataaattccgacgttaaccgatccttcctgcggaaagcgcaagagcaacagatgagaatctcgttaactcttgtttggtagct
